(19) United States
(12) Patent Application Publication
(10) Pub. No.: US 2022/0348933 A1
(43) Pub. Date: Nov. 3, 2022

(54) BIOSYNTHESIS OF ENZYMES FOR USE IN TREATMENT OF MAPLE SYRUP URINE DISEASE (MSUD)

(71) Applicants: Ginkgo Bioworks, Inc., Boston, MA (US); Synlogic Operating Company, Inc., Cambridge, MA (US)

(72) Inventors: Patrick Boyle, Boston, MA (US); Dylan Alexander Carlin, Boston, MA (US); Rishi Jain, Boston, MA (US); Ryan Putman, Boston, MA (US); Laura Stone, Boston, MA (US); Alex C. Tucker, Boston, MA (US); Kolea Zimmerman, Boston, MA (US)

(73) Assignees: Ginkgo Bioworks, Inc., Boston, MA (US); Synlogic Operating Company, Inc., Cambridge, MA (US)

(21) Appl. No.: 17/621,214

(22) PCT Filed: Jun. 19, 2020
(86) PCT No.: PCT/US2020/038813

§ 371 Date: Dec. 20, 2021

Related U.S. Application Data
(60) Provisional application No. 62/864,875, filed on Jun. 21, 2019.
(60) Provisional application No. 62/865,129, filed on Jun. 21, 2019.

(51) Int. Cl. C12N 15/52; C12N 15/70

(52) U.S. Cl. CPC C12N 15/52; C12N 15/70

(57) ABSTRACT

Provided in this disclosure, in some embodiments, are methods and compositions for treating maple syrup urine disease (MSUD) and other conditions characterized by excessive branched-chain amino acids.

### CROSS-REFERENCE TO RELATED APPLICATIONS

[0001] This application claims the benefit under 35 U.S.C. § 119(e) of U.S. Provisional Application Ser. No. 62/865,129, filed Jun. 21, 2019, entitled “BIOSYNTHESIS OF ENZYMES FOR USE IN TREATMENT OF MAPLE SYRUP URINE DISEASE (MSUD),” and U.S. Provisional Application Ser. No. 62/864,875, filed Jun. 21, 2019, entitled “OPTIMIZED BACTERIA ENGINEERED TO TREAT DISORDERS INVOLVING THE CATABOLISM OF LEUCINE, ISOLEUCINE, AND/OR VALINE,” the disclosure of each which is incorporated by reference herein in its entirety.

### REFERENCE TO A SEQUENCE LISTING SUBMITTED AS A TEXT FILE VIA EFS-WEB

[0002] The instant application contains a Sequence Listing which has been submitted in ASCII format via EFS-Web and is hereby incorporated by reference in its entirety. Said ASCII copy, created on Jun. 19, 2020, is named G0919.70033WO00-SEQ-OMJ.txt, and is 1.76 megabytes (MB) in size.

### FIELD OF INVENTION

[0003] The present disclosure relates to enzymes, nucleic acids, and cells useful for the conversion of leucine to isopentanol.

### BACKGROUND

[0004] Maple syrup urine disease (MSUD) is a metabolic disorder caused by a deficiency of the branched-chain alpha-keto acid dehydrogenase complex (BCKDC), leading to a buildup of the branched-chain amino acids (leucine, isoleucine, and valine) and their toxic by-products (ketoacids) in the blood and urine. MSUD gets its name from the distinctive sweet odor of affected individual's urine, particularly prior to diagnosis, and during times of acute illness. There remains a need for improved treatments for MSUD and other conditions characterized by excessive branched-chain amino acids.

### SUMMARY

[0005] The present disclosure is based, at least in part, on generation of engineered cells containing enzymes for consuming leucine, for example, by converting leucine to isopentanol. Such engineered cells are useful, e.g., to treat diseases associated with accumulation of leucine such as MSUD.

[0006] Aspects of the disclosure relate to host cells that comprise a heterologous polynucleotide encoding a leucine dehydrogenase (LeuDH) enzyme, wherein the LeuDH enzyme comprises an amino acid sequence that is at least 90% identical to a sequence selected from SEQ ID NOs: 2, 4, 6, 8, 10, and 12. In some embodiments, the LeuDH enzyme comprises an amino acid sequence that is at least 90% identical to SEQ ID NO: 2. In some embodiments, the LeuDH enzyme comprises SEQ ID NO: 2. In some embodiments, the LeuDH enzyme comprises: V at a residue corresponding to residue 13 in SEQ ID NO: 27; W at a residue corresponding to residue 16 in SEQ ID NO: 27; Q at a residue corresponding to residue 42 in SEQ ID NO: 27; T, Y, F, E, or W at a residue corresponding to residue 43 in SEQ ID NO: 27; I, H, K, or Y at a residue corresponding to residue 44 in SEQ ID NO: 27; T, E, A, S, or K at a residue corresponding to residue 67 in SEQ ID NO: 27; K at a residue corresponding to residue 71 in SEQ ID NO: 27; S at a residue corresponding to residue 73 in SEQ ID NO: 27; R, H, Y, S, K, or W at a residue corresponding to residue 76 in SEQ ID NO: 27; Y at a residue corresponding to residue 92 in SEQ ID NO: 27; H at a residue corresponding to residue 93 in SEQ ID NO: 27; G at a residue corresponding to residue 95 in SEQ ID NO: 27; G at a residue corresponding to residue 100 in SEQ ID NO: 27; C at a residue corresponding to residue 105 in SEQ ID NO: 27; G at a residue corresponding to residue 111 in SEQ ID NO: 27; M at a residue corresponding to residue 113 in SEQ ID NO: 27; N, or V at a residue corresponding to residue 115 in SEQ ID NO: 27; R, N, or W at a residue corresponding to residue 116 in SEQ ID NO: 27; A at a residue corresponding to residue 120 in SEQ ID NO: 27; D at a residue corresponding to residue 122 in SEQ ID NO: 27; E at a residue corresponding to residue 136 in SEQ ID NO: 27; D at a residue corresponding to residue 140 in SEQ ID NO: 27; M at a residue corresponding to residue 141 in SEQ ID NO: 27; S at a residue corresponding to residue 160 in SEQ ID NO: 27; F at a residue corresponding to residue 185 in SEQ ID NO: 27; N at a residue corresponding to residue 196 in SEQ ID NO: 27; Y at a residue corresponding to residue 228 in SEQ ID NO: 27; M at a residue corresponding to residue 248 in SEQ ID NO: 27; C at a residue corresponding to residue 256 in SEQ ID NO: 27; Q or C at a residue corresponding to residue 293 in SEQ ID NO: 27; K or N at a residue corresponding to residue 296 in SEQ ID NO: 27; R, Q, or K at a residue corresponding to residue 297 in SEQ ID NO: 27; C or D at a residue corresponding to residue 300 in SEQ ID NO: 27; T or S at a residue corresponding to residue 302 in SEQ ID NO: 27; C at a residue corresponding to residue 305 in SEQ ID NO: 27; F at a residue corresponding to residue 319 in SEQ ID NO: 27; and/or M at a residue corresponding to residue 330 in SEQ ID NO: 27.

[0007] Further aspects of the disclosure relate to host cells that comprise a heterologous polynucleotide encoding a leucine dehydrogenase (LeuDH) enzyme, wherein the LeuDH enzyme comprises: V at a residue corresponding to residue 13 in SEQ ID NO: 27; W at a residue corresponding to residue 16 in SEQ ID NO: 27; Q at a residue corresponding to residue 42 in SEQ ID NO: 27; T, Y, F, E, or W at a residue corresponding to residue 43 in SEQ ID NO: 27; I, H, K, or Y at a residue corresponding to residue 44 in SEQ ID NO: 27; T, E, A, S, or K at a residue corresponding to residue 67 in SEQ ID NO: 27; K at a residue corresponding to residue 71 in SEQ ID NO: 27; S at a residue corresponding to residue 73 in SEQ ID NO: 27; R, H, Y, S, K, or W at a residue corresponding to residue 76 in SEQ ID NO: 27; Y at a residue corresponding to residue 92 in SEQ ID NO: 27; H at a residue corresponding to residue 93 in SEQ ID NO: 27; G at a residue corresponding to residue 95 in SEQ ID NO: 27; G at a residue corresponding to residue 100 in SEQ ID NO: 27; C at a residue corresponding to residue 105 in SEQ ID NO: 27; G at a residue corresponding to residue 111 in SEQ ID NO: 27; M at a residue corresponding to residue 113 in SEQ ID NO: 27; N, or V at a residue corresponding to residue 115 in SEQ ID NO: 27; R, N, or W at a residue corresponding to residue 116 in SEQ ID NO: 27; A at a residue corresponding to residue 120 in SEQ ID NO: 27; D at a residue corresponding to residue 122 in SEQ ID NO: 27; E at a residue corresponding to residue 136 in SEQ ID NO: 27; D at a residue corresponding to residue 140 in SEQ ID NO: 27; M at a residue corresponding to residue 141 in SEQ ID NO: 27; S at a residue corresponding to residue 160 in SEQ ID NO: 27; F at a residue corresponding to residue 185 in SEQ ID NO: 27; N at a residue corresponding to residue 196 in SEQ ID NO: 27; Y at a residue corresponding to residue 228 in SEQ ID NO: 27; M at a residue corresponding to residue 248 in SEQ ID NO: 27; C at a residue corresponding to residue 256 in SEQ ID NO: 27; Q or C at a residue corresponding to residue 293 in SEQ ID NO: 27; K or N at a residue corresponding to residue 296 in SEQ ID NO: 27; R, Q, or K at a residue corresponding to residue 297 in SEQ ID NO: 27; C or D at a residue corresponding to residue 300 in SEQ ID NO: 27; T or S at a residue corresponding to residue 302 in SEQ ID NO: 27; C at a residue corresponding to residue 305 in SEQ ID NO: 27; F at a residue corresponding to residue 319 in SEQ ID NO: 27; and M at a residue corresponding to residue 330 in SEQ ID NO: 27.

[0008] Further aspects of the disclosure relate to host cells that comprise a heterologous polynucleotide encoding a leucine dehydrogenase (LeuDH) enzyme, wherein relative to SEQ ID NO: 27, the LeuDH enzyme comprises an amino acid substitution at amino acid residue: 42, 43, 44, 67, 71, 76, 78, 113, 115, 116, 136, 293, 296, 297 and/or 300. In some embodiments, the LeuDH enzyme comprises: A, Q, or T at residue 42; E, F, T, W, or Y at residue 43; H, I, K, or Y at residue 44; A, E, K, Q, S, or T at residue 67; C, D, H, K, M, or T at residue 71; E, F, H, I, K, M, R, S, T, W, or Y at residue 76; C, F, H, K, Q, V, or Y at residue 78; F, M, Q, V, W, or Y at residue 113; N, Q, S, T, or V at residue 115; A, L, M, N, R, S, V, or W at residue 116; E, F, L, R, S, or Y at residue 136; A, C, Q, S, or T at residue 293; A, C, E, I, K, L, N, S, or T at residue 296; C, D, E, F, H, K, L, M, N, Q, R, T, W, or Y at residue 297; and/or A, C, D, F, H, K, M, N, Q, R, S, T, W, or Y at residue 300.

[0009] Further aspects of the present disclosure relate to non-naturally occurring LeuDH enzymes, wherein relative to SEQ ID NO: 27, the LeuDH enzyme comprises an amino acid substitution at amino acid residue: 42, 43, 44, 67, 71, 76, 78, 113, 115, 116, 136, 293, 296, 297 and/or 300. In some embodiments, the LeuDH enzyme comprises: A, Q, or T at residue 42; E, F, T, W, or Y at residue 43; H, I, K, or Y at residue 44; A, E, K, Q, S, or T at residue 67; C, D, H, K, M, or Tat residue 71; E, F, H, I, K, M, R, S, T, W, or Y at residue 76; C, F, H, K, Q, V, or Y at residue 78; F, M, Q, V, W, or Y at residue 113; N, Q, S, T, or V at residue 115; A, L, M, N, R, S, V, or W at residue 116; E, F, L, R, S, or Y at residue 136; A, C, Q, S, or T at residue 293; A, C, E, I, K, L, N, S, or T at residue 296; C, D, E, F, H, K, L, M, N, Q, R, T, W, or Y at residue 297; and/or A, C, D, F, H, K, M, N, Q, R, S, T, W, or Y at residue 300.

[0010] Further aspects of the disclosure relate to host cells that comprise a heterologous polynucleotide encoding a branched chain α-ketoacid decarboxylase (KivD) enzyme, wherein the KivD enzyme comprises an amino acid sequence that is at least 90% identical to a sequence selected from SEQ ID NOs: 14, 16, and 18. In some embodiments, the KivD enzyme comprises an amino acid sequence that is at least 90% identical to SEQ ID NO: 18. In some embodiments, the KivD enzyme comprises SEQ ID NO: 18. In some embodiments, the KivD enzyme comprises: Y at a residue corresponding to residue 33 in SEQ ID NO: 29; Q at a residue corresponding to residue 44 in SEQ ID NO: 29; M at a residue corresponding to residue 117 in SEQ ID NO: 29; I at a residue corresponding to residue 129 in SEQ ID NO: 29; W at a residue corresponding to residue 185 in SEQ ID NO: 29; I at a residue corresponding to residue 190 in SEQ ID NO: 29; I at a residue corresponding to residue 225 in SEQ ID NO: 29; Y at a residue corresponding to residue 227 in SEQ ID NO: 29; L at a residue corresponding to residue 311 in SEQ ID NO: 29; G at a residue corresponding to residue 312 in SEQ ID NO: 29; T at a residue corresponding to residue 313 in SEQ ID NO: 29; P at a residue corresponding to residue 328 in SEQ ID NO: 29; W at a residue corresponding to residue 341 in SEQ ID NO: 29; H at a residue corresponding to residue 345 in SEQ ID NO: 29; C at a residue corresponding to residue 347 in SEQ ID NO: 29; R at a residue corresponding to residue 420 in SEQ ID NO: 29; D at a residue corresponding to residue 494 in SEQ ID NO: 29; C at a residue corresponding to residue 508 in SEQ ID NO: 29; and/or F at a residue corresponding to residue 550 in SEQ ID NO: 29.

[0011] Further aspects of the disclosure relate to host cells that comprise a heterologous polynucleotide encoding a branched chain α-ketoacid decarboxylase (KivD) enzyme, wherein the KivD enzyme comprises: Y at a residue corresponding to residue 33 in SEQ ID NO: 29; Q at a residue corresponding to residue 44 in SEQ ID NO: 29; M at a residue corresponding to residue 117 in SEQ ID NO: 29; I at a residue corresponding to residue 129 in SEQ ID NO: 29; W at a residue corresponding to residue 185 in SEQ ID NO: 29; I at a residue corresponding to residue 190 in SEQ ID NO: 29; I at a residue corresponding to residue 225 in SEQ ID NO: 29; Y at a residue corresponding to residue 227 in SEQ ID NO: 29; L at a residue corresponding to residue 311 in SEQ ID NO: 29; G at a residue corresponding to residue 312 in SEQ ID NO: 29; T at a residue corresponding to residue 313 in SEQ ID NO: 29; P at a residue corresponding to residue 328 in SEQ ID NO: 29; W at a residue corresponding to residue 341 in SEQ ID NO: 29; H at a residue corresponding to residue 345 in SEQ ID NO: 29; C at a residue corresponding to residue 347 in SEQ ID NO: 29; R at a residue corresponding to residue 420 in SEQ ID NO: 29; D at a residue corresponding to residue 494 in SEQ ID NO: 29; C at a residue corresponding to residue 508 in SEQ ID NO: 29; and F at a residue corresponding to residue 550 in SEQ ID NO: 29.

[0012] Further aspects of the disclosure relate to host cells that comprise a heterologous polynucleotide encoding an alcohol dehydrogenase (Adh) enzyme wherein the Adh enzyme comprises an amino acid sequence that is at least 90% identical to a sequence selected from SEQ ID NOs: 20, 22, and 24. In some embodiments, the Adh enzyme comprises an amino acid sequence that is at least 90% identical to SEQ ID NO: 24. In some embodiments, the Adh enzyme comprises SEQ ID NO: 24. In some embodiments, the Adh enzyme comprises: P at a residue corresponding to residue 9 in SEQ ID NO: 31; G at a residue corresponding to residue 16 in SEQ ID NO: 31; Q at a residue corresponding to residue 23 in SEQ ID NO: 31; R at a residue corresponding to residue 28 in SEQ ID NO: 31; A at a residue corresponding to residue 30 in SEQ ID NO: 31; K at a residue corresponding to residue 93 in SEQ ID NO: 31; L at a residue corresponding to residue 98 in SEQ ID NO: 31; R at a residue corresponding to residue 99 in SEQ ID NO: 31; P at a residue corresponding to residue 114 in SEQ ID NO: 31; K at a residue corresponding to residue 115 in SEQ ID NO: 31; Y at a residue corresponding to residue 119 in SEQ ID NO: 31; Y at a residue corresponding to residue 194 in SEQ ID NO: 31; P at a residue corresponding to residue 242 in SEQ ID NO: 31; K at a residue corresponding to residue 249 in SEQ ID NO: 31; E at a residue corresponding to residue 255 in SEQ ID NO: 31; D at a residue corresponding to residue 260 in SEQ ID NO: 31; H at a residue corresponding to residue 269 in SEQ ID NO: 31; Q at a residue corresponding to residue 281 in SEQ ID NO: 31; L at a residue corresponding to residue 325 in SEQ ID NO: 31; M at a residue corresponding to residue 333 in SEQ ID NO: 31; P at a residue corresponding to residue 334 in SEQ ID NO: 31; and/or Q at a residue corresponding to residue 348 in SEQ ID NO: 31.

[0013] Further aspects of the disclosure relate to host cells that comprises a heterologous polynucleotide encoding a an alcohol dehydrogenase (Adh) enzyme, wherein the Adh enzyme comprises: P at a residue corresponding to residue 9 in SEQ ID NO: 31; G at a residue corresponding to residue 16 in SEQ ID NO: 31; Q at a residue corresponding to residue 23 in SEQ ID NO: 31; R at a residue corresponding to residue 28 in SEQ ID NO: 31; A at a residue corresponding to residue 30 in SEQ ID NO: 31; K at a residue corresponding to residue 93 in SEQ ID NO: 31; L at a residue corresponding to residue 98 in SEQ ID NO: 31; R at a residue corresponding to residue 99 in SEQ ID NO: 31; P at a residue corresponding to residue 114 in SEQ ID NO: 31; K at a residue corresponding to residue 115 in SEQ ID NO: 31; Y at a residue corresponding to residue 119 in SEQ ID NO: 31; Y at a residue corresponding to residue 194 in SEQ ID NO: 31; P at a residue corresponding to residue 242 in SEQ ID NO: 31; K at a residue corresponding to residue 249 in SEQ ID NO: 31; E at a residue corresponding to residue 255 in SEQ ID NO: 31; D at a residue corresponding to residue 260 in SEQ ID NO: 31; H at a residue corresponding to residue 269 in SEQ ID NO: 31; Q at a residue corresponding to residue 281 in SEQ ID NO: 31; L at a residue corresponding to residue 325 in SEQ ID NO: 31; M at a residue corresponding to residue 333 in SEQ ID NO: 31; P at a residue corresponding to residue 334 in SEQ ID NO: 31; and Q at a residue corresponding to residue 348 in SEQ ID NO: 31.

[0014] In some embodiments, the host cell is a plant cell, an algal cell, a yeast cell, a bacterial cell, or an animal cell. In some embodiments, the host cell is a yeast cell. In some embodiments, the yeast cell is a Saccharomyces cell, a Yarrowia cell or a Pichia cell. In some embodiments, the host cell is a bacterial cell. In some embodiments, the bacterial cell is an E. coli cell or a Bacillus cell.

[0015] In some embodiments, the host cell further comprises a heterologous polynucleotide encoding a branched-chain amino acid transport system 2 carrier protein (BrnQ). In some embodiments, the BrnQ protein is at least 90% identical to the amino acid sequence of SEQ ID NO: 35. In some embodiments, the BrnQ protein comprises the amino acid sequence of SEQ ID NO: 35.

[0016] In some embodiments, the heterologous polynucleotide is operably linked to an inducible promoter. In some embodiments, the heterologous polynucleotide is expressed in an operon. In some embodiments, the operon expresses more than one heterologous polynucleotide, and a ribosome binding site may be present between each heterologous polynucleotide.

[0017] In some embodiments, the host cell further comprises a heterologous polynucleotide encoding a KivD enzyme and/or a heterologous polynucleotide encoding an Adh enzyme.

[0018] In some embodiments, the host cell further comprises a heterologous polynucleotide encoding a LeuDH enzyme and/or a heterologous polynucleotide encoding an Adh enzyme.

[0019] In some embodiments, the host cell further comprises a heterologous polynucleotide encoding a LeuDH enzyme and/or a heterologous polynucleotide encoding a KivD enzyme.

[0020] In some embodiments, the host cell is capable of producing isopentanol from leucine. In some embodiments, the host cell consumes at least two-fold more leucine relative to a control host cell that comprises a heterologous polynucleotide encoding a control LeuDH enzyme comprising the sequence of SEQ ID NO: 27, a heterologous polynucleotide encoding a control KivD enzyme comprising the sequence of SEQ ID NO: 29, a heterologous polynucleotide encoding a control Adh enzyme comprising the sequence of SEQ ID NO: 31, and a heterologous polynucleotide encoding a control BrnQ protein comprising the sequence of SEQ ID NO: 35.

[0021] Further aspects of the disclosure relate to methods comprising culturing any of the host cells disclosed in this application.

[0022] Further aspects of the disclosure relate to methods for producing isopentanol from leucine comprising culturing any of the host cells disclosed in this application.

[0023] Further aspects of the disclosure relate to non-naturally occurring nucleic acids comprising a sequence that is at least 90% identical to a nucleic acid sequence selected from SEQ ID NOs: 1, 3, 5, 7, 9, and 11.

[0024] Further aspects of the disclosure relate to non-naturally occurring nucleic acids comprising a sequence that is at least 90% identical to a nucleic acid sequence selected from SEQ ID NOs: 13, 15, and 17.

[0025] Further aspects of the disclosure relate to non-naturally occurring nucleic acids comprising a sequence that is at least 90% identical to a nucleic acid sequence selected from SEQ ID NOs: 19, 21, and 23.

[0026] Further aspects of the disclosure relate to non-naturally occurring nucleic acids encoding a sequence that is at least 90% identical to a sequence selected from SEQ ID NOs: 2, 4, 6, 8, 10, and 12.

[0027] Further aspects of the disclosure relate to non-naturally occurring nucleic acids encoding a sequence that is at least 90% identical to a sequence selected from SEQ ID NOs: 14, 16, and 18.

[0028] Further aspects of the disclosure relate to non-naturally occurring nucleic acids encoding a sequence that is at least 90% identical to a sequence selected from SEQ ID NOs: 20, 22, and 24.

[0029] Further aspects of the disclosure relate to vectors comprising any of the non-naturally occurring nucleic acids disclosed in this application.

[0030] Further aspects of the disclosure relate to expression cassettes comprising any of the non-naturally occurring nucleic acids disclosed in this application.

[0031] Each of the limitations of the invention can encompass various embodiments of the invention. It is, therefore, anticipated that each of the limitations of the invention involving any one element or combinations of elements can be included in each aspect of the invention. This invention is not limited in its application to the details of construction and the arrangement of components set forth in the following description or illustrated in the drawings. The invention is capable of other embodiments and of being practiced or of being carried out in various ways.

### BRIEF DESCRIPTION OF THE DRAWINGS

[0032] The accompanying drawings are not intended to be drawn to scale. In the drawings, each identical or nearly identical component that is illustrated in various figures is represented by a like numeral. For purposes of clarity, not every component may be labeled in every drawing. In the drawings:

[0033] FIGS. 1A-1C depict sequence similarity networks. Each spot represents a single amino acid sequence available in sequence databases. The more closely-related amino acid sequences are, the closer the spots are to one another. Each sequence similarity network has a corresponding cluster key with information regarding the annotation or source of the enzyme. FIG. 1A shows a sequence similarity network for leucine dehydrogenase (LeuDH). The cluster key indicates the annotation of the enzyme. FIG. 1B shows a sequence similarity network for ketoisovalerate decarboxylase (KivD). The annotation each spot represents the phylogenetic clade from which the enzyme was sourced. FIG. 1C shows a sequence similarity network for alcohol dehydrogenase (Adh). The annotation of each spot represents the phylogenetic clade from which the enzyme was sourced.

[0034] FIG. 2 depicts a graph showing data from screening of LeuDH enzymes. 220 LeuDH enzymes were screened with biological replication (n=4) to validate enzyme activity and ranking. Activities are reported relative the B. cereus LeuDH activity.

[0035] FIG. 3 depicts graphs showing data from comparison of activity and specificity of LeuDH enzymes. The top˜200 LeuDH enzymes were screened for activity on Leu, Val, and Ile. Activity of LeuDH enzymes on Leu are reported relative to B. cereus LeuDH activity. Specificity is measured as the ratio of activity on Leu relative to Val/Leu. In the left panel, enzyme activity on Leu is reported relative to the Leu/Val specificity. In the right panel, enzyme activity is reported relative to the Leu/Ile specificity. Rationally engineered active site variants are shown as unfilled circles. Sourced LeuDH enzymes are shown in solid filled circles. The negative control and positive control B. cereus LeuDH are also shown.

[0036] FIG. 4 shows data from comparison of specificity for LeuDH enzymes. The top˜200 LeuDH enzymes were screened for activity on Leu, Val, and Be. Specificity is measured as the ratio of activity on Leu relative to Val/Leu. Rationally engineered active site variants are shown as unfilled circles. Sourced LeuDH enzymes are shown with filled circles. The negative control and the positive control B. cereus LeuDH are shown.

[0037] FIG. 5 depicts a graph showing data from screening of KivD enzymes. 55 KivD enzymes were screened for activity with biological replication (n=4). Activities are reported relative to the activity of a lysate containing heterologously expressed S. aureus KivD (whose activity was indistinguishable from the measurable background activity of the lysate and so was equated to background).

[0038] FIG. 6 shows data from screening of Adh enzymes. 55 Adh enzymes were screened with biological replication (n=4). Activities are reported relative to the activity of a lysate containing heterologously expressed S. cerevisiae ADH2 (whose activity was indistinguishable from the measurable background activity of the lysate and so was equated to background).

[0039] FIG. 7 shows data of selectivity of LeuDH enzymes. In total, 21 candidate LeuDH enzymes were tested. Each set of bars, from left to right, shows Leu consumed, Be consumed and Val consumed.

[0040] FIG. 8 shows a comparison of the rate of Leu consumption over time between top Leu consuming strains (5941, 5942 and 5943) and a prototype strain (1980). 8 mM leucine was added to minimum media and samples were taken at 0, 2, and 4 hour time points after anaerobic incubation.

[0041] FIG. 9 shows the MSUD pathway for conversion of leucine to isopentanol.

[0042] FIG. 10 shows extracellular profiles of the isopentanol pathway intermediates for strain 5941 assayed in Ambr15 bioreactors (n=2). Error bars reflect standard deviation across the duplicate bioreactors. The data corresponding to “Sum” represents the aggregate total concentration of the intermediates shown. Leu=Leucine, Acid=2-oxoisocaproate, Aldehyde=isovaleraldehyde, Alcohol=isopentanol.

### DETAILED DESCRIPTION OF THE INVENTION

[0043] The present disclosure provides, in some aspects, cells and combination of enzymes of the branched-chain amino acid (BCAA) pathway that are engineered for leucine consumption. These BCAA pathway enzymes include leucine dehydrogenase (LeuDH), ketoisovalerate decarboxylase (KivD), and alcohol dehydrogenase (Adh). The disclosed enzymes and host cells comprising such enzymes may be used to promote leucine consumption, e.g., in a subject suffering from a disorder associated with a buildup of BCAA (e.g., leucine) such as maple syrup urine disease (MSUD) and in other medical and industrial settings.

### Leucine Dehydrogenase (LeuDH)

[0044] As used in this disclosure “leucine dehydrogenase (LeuDH)” refers to an enzyme that catalyzes the reversible deamination of branched-chain L-amino acids (e.g., L-leucine, L-valine, L-isoleucine) to their 2-oxo analogs. A LeuDH enzyme may use L-leucine as a substrate. In some embodiments, LeuDH exhibits specificity for L-leucine compared to L-valine and/or L-isoleucine. In some embodiments, LeuDH produces ketoisocaproate (also known as 2-oxoisocaproate) from L-leucine.

[0045] In some embodiments, a host cell comprises a LeuDH enzyme and/or a heterologous polynucleotide encoding such an enzyme. In some embodiments, a host cell comprises a heterologous polynucleotide encoding a LeuDH enzyme comprising an amino acid sequence that is at least 80% (e.g., at least 80%, at least 85%, at least 90%, at least 91%, at least 92%, at least 93%, at least 94%, at least 95%, at least 96%, at least 97%, at least 98%, at least 99%, or 100%) identical to any one of SEQ ID NO: 2, 4, 6, 8, 10, 12, or 257-475, a LeuDH enzyme in Table 3 or Table 4, or a LeuDH enzyme otherwise described in this disclosure. In some embodiments, a host cell comprises a heterologous polynucleotide that is at least 90% (e.g., at least 90%, at least 91%, at least 92%, at least 93%, at least 94%, at least 95%, at least 96%, at least 97%, at least 98%, at least 99%, or 100%) identical to any one of SEQ ID NO: 1, 3, 5, 7, 9, 11, or 37-255, a polynucleotide encoding a LeuDH enzyme in Table 3 or Table 4, or a LeuDH enzyme otherwise described in this disclosure.

[0046] In some embodiments, a host cell comprises LeuDH from Bacillus cereus. In other embodiments, a host cell does not comprise LeuDH from Bacillus cereus.

[0047] LeuDH from Bacillus cereus can comprise the amino acid sequence of UniProtKB—P0A392 (SEQ ID NO: 27):

(SEQ ID NO: 27)
MTLEIFEYLEKYDYEQVVFCQDKESGLKAIIAIHDTTLGPALGGTRMWTY
DSEEAAIEDALRLAKGMTYKNAAAGLNLGGAKTVIIGDPRKDKSEAMFRA
LGRYIQGLNGRYITAEDVGTTVDDMDIIHEETDFVTGISPSFGSSGNPSP
VTAYGVYRGMKAAAKEAFGTDNLEGKVIAVQGVGNVAYHLCKHLHAEGAK
LIVTDINKEAVQRAVEEFGASAVEPNEIYGVECDIYAPCALGATVNDETI
PQLKAKVIAGSANNQLKEDRHGDIIHEMGIVYAPDYVINAGGVINVADEL
YGYNRERALKRVESIYDTIAKVIEISKRDGIATYVAADRLAEERIASLKN
SRSTYLRNGHDIISRR

[0048] In some embodiments, the amino acid sequence of SEQ ID NO: 27 is encoded by the nucleic acid sequence:

(SEQ ID NO: 28)
ATGACCCTTGAGATTTTTGAATACCTCGAAAAATATGATTATGAGCAGGT
CGTTTTCTGTCAAGACAAGGAATCAGGACTGAAAGCGATCATTGCTATCC
ATGATACTACACTGGGGCCAGCCTTAGGTGGCACCCGTATGTGGACGTAC
GACTCGGAAGAAGCGGCAATTGAGGATGCCTTGAGGTTAGCTAAGGGCAT
GACGTATAAAAACGCGGCAGCCGGTTTGAATCTGGGCGGTGCGAAAACCG
TGATTATCGGGGATCCCCGCAAAGACAAATCTGAAGCAATGTTTCGGGCG
CTGGGCCGATACATACAGGGACTAAATGGTCGCTATATCACCGCTGAAGA
TGTAGGAACTACCGTGGATGATATGGACATAATTCACGAAGAAACGGACT
TCGTCACGGGCATTAGCCCTAGTTTTGGTAGCTCCGGGAACCCGTCTCCG
GTTACCGCCTATGGCGTGTACCGTGGCATGAAGGCAGCAGCGAAAGAGGC
CTTTGGTACAGACAACCTGGAGGGGAAAGTGATCGCGGTTCAAGGGGTAG
GTAATGTGGCGTATCATCTGTGCAAACACTTACATGCCGAGGGCGCCAAG
CTGATTGTCACGGATATCAACAAAGAAGCGGTACAGCGTGCAGTCGAAGA
ATTTGGCGCTTCCGCCGTTGAGCCGAATGAAATCTACGGCGTGGAATGCG
ATATTTACGCGCCGTGTGCTCTTGGTGCGACAGTCAACGATGAAACGATC
CCTCAGCTGAAAGCAAAGGTAATTGCGGGTTCGGCTAATAACCAGTTAAA
AGAAGACAGACATGGAGACATAATTCACGAGATGGGTATTGTTTATGCAC
CAGATTATGTAATCAATGCGGGCGGCGTTATTAACGTCGCAGATGAACTG
TATGGCTACAACCGCGAACGCGCCCTCAAACGTGTGGAGTCAATTTATGA
CACCATTGCCAAAGTGATCGAAATCAGCAAGCGCGATGGAATCGCCACTT
ATGTGGCTGCCGATCGTCTGGCGGAAGAACGCATTGCAAGTCTCAAAAAT
AGCCGTTCCACCTACCTTCGCAATGGCCATGATATTATAAGTCGGCGTTG
A

[0049] In some embodiments, a host cell that expresses a heterologous polynucleotide encoding a LeuDH enzyme may increase conversion of leucine to ketoisocaproate by 0.5-fold, 1-fold, 1.5-fold, 2-fold, 2.5-fold, 3-fold, 3.5-fold, 4-fold, 4.5-fold, 5-fold, 5.5-fold, or 6-fold more (e.g., 2-fold to 6-fold more) relative to a control. In some embodiments, the control is a host cell that expresses a heterologous polynucleotide encoding SEQ ID NO: 27. In some embodiments, the control is an E. coli Nissle strain SYN1980 ΔleuE, ΔilvC, lacZ:tetR-Ptet-livKHMGF, tetR-Ptet-leuDH(Bc)-kivD-adh2-brnQ-rrnB ter (pSC101), such as is described in U.S. Patent Application Publication No. US20170232043.

[0050] In some embodiments, a host cell that expresses a heterologous polynucleotide encoding a LeuDH enzyme may exhibit at least 0.5-fold, 1-fold, 1.5-fold, 2-fold, 2.5-fold, 3-fold, 3.5-fold, 4-fold, 4.5-fold, 5-fold, 5.5-fold, or 6-fold more (e.g., 2-fold to 6-fold more) more activity on leucine relative to valine. In some embodiments, a host cell that expresses a heterologous polynucleotide encoding a LeuDH enzyme may exhibit at least 0.5-fold, 1-fold, 1.5-fold, 2-fold, 2.5-fold, 3-fold, 3.5-fold, 4-fold, 4.5-fold, 5-fold, 5.5-fold, or 6-fold more (e.g., 2-fold to 6-fold more) more activity on leucine relative to isoleucine.

[0051] In some embodiments, a LeuDH comprises a sequence that is at least 5%, at least 10%, at least 15%, at least 20%, at least 25%, at least 30%, at least 35%, at least 40%, at least 45%, at least 50%, at least 55%, at least 60%, at least 65%, at least 70%, at least 71%, at least 72%, at least 73%, at least 74%, at least 75%, at least 76%, at least 77%, at least 78%, at least 79%, at least 80%, at least 81%, at least 82%, at least 83%, at least 84%, at least 85%, at least 86%, at least 87%, at least 88%, at least 89%, at least 90%, at least 91%, at least 92%, at least 93%, at least 94%, at least 95%, at least 96%, at least 97%, at least 98%, at least 99%, or is 100% identical to SEQ ID NO: 27, any one of SEQ ID NO: 2, 4, 6, 8, 10, 12, or 257-475, any one of SEQ ID NO: 1, 3, 5, 7, 9, 11, or 37-255, an amino acid or polynucleotide sequence of a LeuDH enzyme in Table 3 or Table 4, or a LeuDH enzyme otherwise described in this disclosure.

[0052] In some embodiments, such a LeuDH enzyme comprises: V at a residue corresponding to residue 13 in SEQ ID NO: 27; W at a residue corresponding to residue 16 in SEQ ID NO: 27; Q at a residue corresponding to residue 42 in SEQ ID NO: 27; T, Y, F, E, or W at a residue corresponding to residue 43 in SEQ ID NO: 27; I, H, K, or Y at a residue corresponding to residue 44 in SEQ ID NO: 27; T, E, A, S, or K at a residue corresponding to residue 67 in SEQ ID NO: 27; K at a residue corresponding to residue 71 in SEQ ID NO: 27; S at a residue corresponding to residue 73 in SEQ ID NO: 27; R, H, Y, S, K, or W at a residue corresponding to residue 76 in SEQ ID NO: 27; Y at a residue corresponding to residue 92 in SEQ ID NO: 27; H at a residue corresponding to residue 93 in SEQ ID NO: 27; G at a residue corresponding to residue 95 in SEQ ID NO: 27; G at a residue corresponding to residue 100 in SEQ ID NO: 27; C at a residue corresponding to residue 105 in SEQ ID NO: 27; G at a residue corresponding to residue 111 in SEQ ID NO: 27; M at a residue corresponding to residue 113 in SEQ ID NO: 27; N, or V at a residue corresponding to residue 115 in SEQ ID NO: 27; R, N, or W at a residue corresponding to residue 116 in SEQ ID NO: 27; A at a residue corresponding to residue 120 in SEQ ID NO: 27; D at a residue corresponding to residue 122 in SEQ ID NO: 27; E at a residue corresponding to residue 136 in SEQ ID NO: 27; D at a residue corresponding to residue 140 in SEQ ID NO: 27; M at a residue corresponding to residue 141 in SEQ ID NO: 27; S at a residue corresponding to residue 160 in SEQ ID NO: 27; F at a residue corresponding to residue 185 in SEQ ID NO: 27; N at a residue corresponding to residue 196 in SEQ ID NO: 27; Y at a residue corresponding to residue 228 in SEQ ID NO: 27; M at a residue corresponding to residue 248 in SEQ ID NO: 27; C at a residue corresponding to residue 256 in SEQ ID NO: 27; Q or C at a residue corresponding to residue 293 in SEQ ID NO: 27; K or N at a residue corresponding to residue 296 in SEQ ID NO: 27; R, Q, or K at a residue corresponding to residue 297 in SEQ ID NO: 27; C or D at a residue corresponding to residue 300 in SEQ ID NO: 27; T or S at a residue corresponding to residue 302 in SEQ ID NO: 27; C at a residue corresponding to residue 305 in SEQ ID NO: 27; F at a residue corresponding to residue 319 in SEQ ID NO: 27; and/or M at a residue corresponding to residue 330 in SEQ ID NO: 27.

[0053] In some embodiments, a LeuDH enzyme comprises: V at a residue corresponding to residue 13 in SEQ ID NO: 27; W at a residue corresponding to residue 16 in SEQ ID NO: 27; Q at a residue corresponding to residue 42 in SEQ ID NO: 27; T, Y, F, E, or W at a residue corresponding to residue 43 in SEQ ID NO: 27; I, H, K, or Y at a residue corresponding to residue 44 in SEQ ID NO: 27; T, E, A, S, or K at a residue corresponding to residue 67 in SEQ ID NO: 27; K at a residue corresponding to residue 71 in SEQ ID NO: 27; S at a residue corresponding to residue 73 in SEQ ID NO: 27; R, H, Y, S, K, or W at a residue corresponding to residue 76 in SEQ ID NO: 27; Y at a residue corresponding to residue 92 in SEQ ID NO: 27; H at a residue corresponding to residue 93 in SEQ ID NO: 27; G at a residue corresponding to residue 95 in SEQ ID NO: 27; G at a residue corresponding to residue 100 in SEQ ID NO: 27; C at a residue corresponding to residue 105 in SEQ ID NO: 27; G at a residue corresponding to residue 111 in SEQ ID NO: 27; M at a residue corresponding to residue 113 in SEQ ID NO: 27; N, or V at a residue corresponding to residue 115 in SEQ ID NO: 27; R, N, or W at a residue corresponding to residue 116 in SEQ ID NO: 27; A at a residue corresponding to residue 120 in SEQ ID NO: 27; D at a residue corresponding to residue 122 in SEQ ID NO: 27; E at a residue corresponding to residue 136 in SEQ ID NO: 27; D at a residue corresponding to residue 140 in SEQ ID NO: 27; M at a residue corresponding to residue 141 in SEQ ID NO: 27; S at a residue corresponding to residue 160 in SEQ ID NO: 27; F at a residue corresponding to residue 185 in SEQ ID NO: 27; N at a residue corresponding to residue 196 in SEQ ID NO: 27; Y at a residue corresponding to residue 228 in SEQ ID NO: 27; M at a residue corresponding to residue 248 in SEQ ID NO: 27; C at a residue corresponding to residue 256 in SEQ ID NO: 27; Q or C at a residue corresponding to residue 293 in SEQ ID NO: 27; K or N at a residue corresponding to residue 296 in SEQ ID NO: 27; R, Q, or K at a residue corresponding to residue 297 in SEQ ID NO: 27; C or D at a residue corresponding to residue 300 in SEQ ID NO: 27; T or S at a residue corresponding to residue 302 in SEQ ID NO: 27; C at a residue corresponding to residue 305 in SEQ ID NO: 27; F at a residue corresponding to residue 319 in SEQ ID NO: 27; and M at a residue corresponding to residue 330 in SEQ ID NO: 27.

[0054] In some embodiments, a LeuDH enzyme comprises at least 1, at least 2, at least 3, at least 4, at least 5, at least 6, at least 7, at least 8, at least 9, at least 10, at least 11, at least 12, at least 13, at least, at least 15, at least 16, at least 17, at least 18, at least 19, at least 20, at least 21, at least 22, at least 23, at least 24, at least 25, at least 26, at least 27, at least 28, at least 29, at least 30, at least 31, at least 32, at least 33, at least 34, at least 35, at least 36, at least 37, at least 38, at least 39, at least 40, at least 41, at least 42, at least 43, at least 44, at least 45, at least 46, at least 47, at least 48, at least 49, at least 50, at least 60, at least 70, at least 80, at least 90, or at least 100 amino acid substitutions, deletions, insertions, or additions relative to SEQ ID NO: 27, any one of SEQ ID NO: 2, 4, 6, 8, 10, 12, or 257-475, a LeuDH enzyme in Table 3 or Table 4, or a LeuDH enzyme otherwise described in this disclosure.

[0055] In some embodiments, a LeuDH enzyme comprises an amino acid substitution at one or more residues relative to SEQ ID NO: 27. In some embodiments, a LeuDH enzyme comprises an amino acid substitution at a residue corresponding to position 42 in SEQ ID NO: 27, at a residue corresponding to position 43 in SEQ ID NO: 27, at a residue corresponding to position 44 in SEQ ID NO: 27, at a residue corresponding to position 67 in SEQ ID NO: 27, at a residue corresponding to position 71 in SEQ ID NO: 27, at a residue corresponding to position 76 in SEQ ID NO: 27, at a residue corresponding to position 78 in SEQ ID NO: 27, at a residue corresponding to position 113 in SEQ ID NO: 27, at a residue corresponding to position 115 in SEQ ID NO: 27, at a residue corresponding to position 116 in SEQ ID NO: 27, at a residue corresponding to position 136 in SEQ ID NO: 27, at a residue corresponding to position 293 in SEQ ID NO: 27, at a residue corresponding to position 296 in SEQ ID NO: 27, at a residue corresponding to position 297 in SEQ ID NO: 27, and/or at a residue corresponding to position 300 in SEQ ID NO: 27. In some embodiments, a LeuDH enzyme comprises: A, Q, or T at a residue corresponding to position 42 in SEQ ID NO: 27; E, F, T, W, or Y at a residue corresponding to position 43 in SEQ ID NO: 27; H, I, K, or Y at a residue corresponding to position 44 in SEQ ID NO: 27; A, E, K, Q, S, or T at a residue corresponding to position 67 in SEQ ID NO: 27; C, D, H, K, M, or T at a residue corresponding to position 71 in SEQ ID NO: 27; E, F, H, I, K, M, R, S, T, W, or Y at a residue corresponding to position 76 in SEQ ID NO: 27; C, F, H, K, Q, V, or Y at a residue corresponding to position 78 in SEQ ID NO: 27; F, M, Q, V, W, or Y at a residue corresponding to position 113 in SEQ ID NO: 27; N, Q, S, T, or V at a residue corresponding to position 115 in SEQ ID NO: 27; A, L, M, N, R, S, V, or W at a residue corresponding to position 116 in SEQ ID NO: 27; E, F, L, R, S, or Y at a residue corresponding to position 136 in SEQ ID NO: 27; A, C, Q, S, or T at a residue corresponding to position 293 in SEQ ID NO: 27; A, C, E, I, K, L, N, S, or T at a residue corresponding to position 296 in SEQ ID NO: 27; C, D, E, F, H, K, L, M, N, Q, R, T, W, or Y at a residue corresponding to position 297 in SEQ ID NO: 27; and/or A, C, D, F, H, K, M, N, Q, R, S, T, W, or Y at a residue corresponding to position 300 in SEQ ID NO: 27.

[0056] In some embodiments, relative to SEQ ID NO: 27, a LeuDH enzyme comprises an amino acid substitution at amino acid residue: 42, 43, 44, 67, 71, 76, 78, 113, 115, 116, 136, 293, 296, 297 and/or 300. In some embodiments, a LeuDH enzyme comprises A, Q, or T at residue 42; E, F, T, W, or Y at residue 43; H, I, K, or Y at residue 44; A, E, K, Q, S, or T at residue 67; C, D, H, K, M, or T at residue 71; E, F, H, I, K, M, R, S, T, W, or Y at residue 76; C, F, H, K, Q, V, or Y at residue 78; F, M, Q, V, W, or Y at residue 113; N, Q, S, T, or V at residue 115; A, L, M, N, R, S, V, or W at residue 116; E, F, L, R, S, or Y at residue 136; A, C, Q, S, or T at residue 293; A, C, E, I, K, L, N, S, or T at residue 296; C, D, E, F, H, K, L, M, N, Q, R, T, W, or Y at residue 297; and/or A, C, D, F, H, K, M, N, Q, R, S, T, W, or Y at residue 300.

### Ketoisovalerate Decarboxylase (KivD)

[0057] As used in this disclosure “ketoisovalerate decarboxylase (KivD)” refers to an enzyme that catalyzes the decarboxylation of alpha-keto acids derived from amino acid transamination into aldehydes. A KivD may use ketoisocaproate as a substrate. In some embodiments, KivD produces isovaleraldehyde from ketoisocaproate.

[0058] In some embodiments, a host cell comprises a KivD enzyme and/or a heterologous polynucleotide encoding such an enzyme. In some embodiments, a host cell comprises a heterologous polynucleotide encoding a KivD enzyme comprising an amino acid sequence that is at least 80% (e.g., at least 80%, at least 85%, at least 90%, at least 91%, at least 92%, at least 93%, at least 94%, at least 95%, at least 96%, at least 97%, at least 98%, at least 99%, or 100%) identical to any one of SEQ ID NO: 14, 16, 18, or 533-588, a KivD enzyme in Table 3 or Table 5, or a KivD enzyme otherwise described in this disclosure. In some embodiments, a host cell comprises a heterologous polynucleotide that is at least 90% (e.g., at least 90%, at least 91%, at least 92%, at least 93%, at least 94%, at least 95%, at least 96%, at least 97%, at least 98%, at least 99%, or 100%) identical to any one of SEQ ID NO: 13, 15, 17 or 477-532, a polynucleotide encoding a KivD enzyme in Table 3 or Table 5, or a polynucleotide encoding a KivD enzyme otherwise described in this disclosure.

[0059] In some embodiments, a host cell comprises KivD from Lactococcus lactis. In other embodiments, a host cell does not comprise KivD from Lactococcus lactis.

[0060] KivD from Lactococcus lactis can comprise the amino acid sequence of UniProtKB—Q684J7 (SEQ ID NO: 29):

(SEQ ID NO: 29)
MYTVGDYLLDRLHELGIEEIFGVPGDYNLQFLDQIISHKDMKWVGNANEL
NASYMADGYARTKKAAAFLTTFGVGELSAVNGLAGSYAENLPVVEIVGSP
TSKVQNEGKFVHHTLADGDFKHFMKMHEPVTAARTLLTAENATVEIDRVL
SALLKERKPVYINLPVDVAAAKAEKPSLPLKKENSTSNTSDQEILNKIQE
SLKNAKKPIVITGHEIISFGLEKTVTQFISKTKLPITTLNFGKSSVDEAL
PSFLGIYNGTLSEPNLKEFVESADFILMLGVKLTDSSTGAFTHHLNENKM
ISLNIDEGKIFNERIQNFDFESLISSLLDLSEIEYKGKYIDKKQEDFVPS
NALLSQDRLWQAVENLTQSNETIVAEQGTSFFGASSIFLKSKSHFIGQPL
WGSIGYTFPAALGSQIADKESRHLLFIGDGSLQLTVQELGLAIREKINPI
CFIINNDGYTVEREIHGPNQSYNDIPMWNYSKLPESFGATEDRVVSKIVR
TENEFVSVMKEAQADPNRMYWIELILAKEGAPKVLKKMGKLFAEQNKS

[0061] In some embodiments, the amino acid sequence of SEQ ID NO: 29 is encoded by the nucleic acid sequence:

(SEQ ID NO: 30)
ATGTACACAGTCGGTGATTATCTTTTAGACCGACTGCACGAACTCGGAAT
CGAGGAAATTTTTGGCGTGCCCGGGGATTATAACTTGCAGTTCCTGGACC
AAATAATTTCCCATAAGGATATGAAATGGGTAGGCAATGCTAACGAACTG
AATGCGTCTTACATGGCCGATGGTTATGCACGGACCAAAAAAGCGGCAGC
CTTTCTGACGACTTTCGGCGTTGGTGAGTTAAGCGCGGTGAACGGCCTGG
CGGGGTCATACGCCGAAAATCTACCAGTTGTCGAAATCGTGGGCTCGCCG
ACCAGCAAAGTTCAGAACGAGGGTAAGTTTGTGCATCACACCCTTGCTGA
CGGAGATTTTAAACATTTCATGAAAATGCACGAACCTGTAACGGCAGCGC
GCACACTGTTGACTGCGGAGAACGCCACCGTCGAAATTGATCGCGTCCTG
AGTGCTCTTCTGAAGGAACGTAAACCGGTGTATATCAATCTCCCGGTTGA
CGTGGCGGCAGCTAAAGCCGAAAAACCGAGTTTGCCCTTAAAGAAAGAGA
ATAGCACGTCTAACACGTCTGACCAAGAAATTCTGAACAAAATTCAGGAA
TCCCTCAAAAATGCGAAAAAACCTATCGTCATCACCGGTCATGAAATAAT
TTCATTTGGACTGGAGAAAACCGTTACACAGTTCATCTCAAAGACGAAAC
TGCCAATTACCACCCTAAATTTTGGCAAATCGTCCGTAGACGAAGCCCTG
CCGAGCTTCTTGGGGATCTATAACGGCACTTTAAGCGAACCGAATTTAAA
GGAATTTGTGGAGAGCGCCGATTTCATTCTCATGCTGGGTGTTAAGCTGA
CAGATTCCAGTACGGGCGCGTTCACTCATCACCTGAACGAGAACAAAATG
ATCTCGTTGAACATTGATGAAGGAAAAATATTTAATGAACGTATTCAAAA
CTTCGATTTTGAATCGCTGATTTCTTCCCTACTGGACCTCAGCGAGATCG
AATACAAAGGTAAATATATTGATAAAAAACAGGAAGACTTTGTGCCGAGT
AACGCACTGTTGTCTCAGGATCGCCTGTGGCAAGCTGTGGAAAATCTGAC
CCAGAGTAACGAAACGATTGTCGCGGAACAGGGGACCTCTTTCTTTGGTG
CTTCGTCAATCTTTTTAAAGTCAAAATCACATTTTATTGGCCAACCACTT
TGGGGTAGTATCGGCTACACTTTCCCTGCGGCACTGGGTAGTCAGATTGC
CGATAAAGAGTCGCGTCACCTTTTGTTTATTGGGGATGGCTCGCTACAAT
TGACCGTTCAGGAGTTAGGTCTTGCTATACGCGAAAAAATCAATCCGATC
TGTTTCATTATCAATAATGACGGCTATACCGTGGAGCGCGAAATCCATGG
TCCGAATCAGAGCTATAACGATATACCGATGTGGAATTACAGCAAACTCC
CCGAGAGCTTTGGCGCAACAGAAGATAGGGTTGTCTCCAAGATCGTGCGT
ACGGAAAACGAATTTGTAAGTGTAATGAAAGAAGCGCAAGCGGACCCTAA
TCGAATGTACTGGATTGAACTTATTCTGGCAAAAGAAGGGGCCCCTAAAG
TCCTCAAGAAAATGGGGAAGTTGTTCGCCGAACAAAACAAAAGCTGA

[0062] In some embodiments, a host cell that expresses a heterologous polynucleotide encoding a KivD enzyme may increase conversion of ketoisocaproate to isovaleraldehyde by 0.5-fold, 1-fold, 1.5-fold, 2-fold, 2.5-fold, 3-fold, 3.5-fold, 4-fold, 4.5-fold, 5-fold, 5.5-fold, or 6-fold more (e.g., 2-fold to 6-fold more) relative to a control. In some embodiments, a control is a host cell that expresses a heterologous polynucleotide encoding SEQ ID NO: 29. In some embodiments, the control is an E. coli Nissle strain SYN1980 ΔleuE, ΔilvC, lacZ:tetR-Ptet-livKHMGF, tetR-Ptet-leuDH(Bc)-kivD-adh2-brnQ-rrnB ter (pSC101), such as is described in U.S. Patent Application Publication No. US20170232043.

[0063] In some embodiments, a KivD enzyme comprises a sequence that is at least 5%, at least 10%, at least 15%, at least 20%, at least 25%, at least 30%, at least 35%, at least 40%, at least 45%, at least 50%, at least 55%, at least 60%, at least 65%, at least 70%, at least 71%, at least 72%, at least 73%, at least 74%, at least 75%, at least 76%, at least 77%, at least 78%, at least 79%, at least 80%, at least 81%, at least 82%, at least 83%, at least 84%, at least 85%, at least 86%, at least 87%, at least 88%, at least 89%, at least 90%, at least 91%, at least 92%, at least 93%, at least 94%, at least 95%, at least 96%, at least 97%, at least 98%, at least 99%, or is 100% identical to SEQ ID NO: 29, any one of SEQ ID NO: 14, 16, 18, or 533-588, any one of SEQ ID NO: 13, 15, 17 or 477-532, an amino acid or polynucleotide sequence encoding a KivD enzyme in Table 3 or Table 5, or a KivD enzyme otherwise described in this disclosure.

[0064] In some embodiments, a KivD enzyme comprises at least 1, at least 2, at least 3, at least 4, at least 5, at least 6, at least 7, at least 8, at least 9, at least 10, at least 11, at least 12, at least 13, at least, at least 15, at least 16, at least 17, at least 18, at least 19, at least 20, at least 21, at least 22, at least 23, at least 24, at least 25, at least 26, at least 27, at least 28, at least 29, at least 30, at least 31, at least 32, at least 33, at least 34, at least 35, at least 36, at least 37, at least 38, at least 39, at least 40, at least 41, at least 42, at least 43, at least 44, at least 45, at least 46, at least 47, at least 48, at least 49, at least 50, at least 60, at least 70, at least 80, at least 90, or at least 100 amino acid substitutions, deletions, insertions, or additions relative to SEQ ID NO: 29, any one of SEQ ID NO: 14, 16, 18, or 533-588, a KivD enzyme in Table 3 or Table 5, or a KivD enzyme otherwise described in this disclosure.

[0065] In some embodiments, a KivD enzyme comprises: Y at a residue corresponding to residue 33 in SEQ ID NO: 29; Q at a residue corresponding to residue 44 in SEQ ID NO: 29; M at a residue corresponding to residue 117 in SEQ ID NO: 29; I at a residue corresponding to residue 129 in SEQ ID NO: 29; W at a residue corresponding to residue 185 in SEQ ID NO: 29; I at a residue corresponding to residue 190 in SEQ ID NO: 29; I at a residue corresponding to residue 225 in SEQ ID NO: 29; Y at a residue corresponding to residue 227 in SEQ ID NO: 29; L at a residue corresponding to residue 311 in SEQ ID NO: 29; G at a residue corresponding to residue 312 in SEQ ID NO: 29; T at a residue corresponding to residue 313 in SEQ ID NO: 29; P at a residue corresponding to residue 328 in SEQ ID NO: 29; W at a residue corresponding to residue 341 in SEQ ID NO: 29; H at a residue corresponding to residue 345 in SEQ ID NO: 29; C at a residue corresponding to residue 347 in SEQ ID NO: 29; R at a residue corresponding to residue 420 in SEQ ID NO: 29; D at a residue corresponding to residue 494 in SEQ ID NO: 29; C at a residue corresponding to residue 508 in SEQ ID NO: 29; and/or F at a residue corresponding to residue 550 in SEQ ID NO: 29.

[0066] In some embodiments, a KivD enzyme comprises: Y at a residue corresponding to residue 33 in SEQ ID NO: 29; Q at a residue corresponding to residue 44 in SEQ ID NO: 29; M at a residue corresponding to residue 117 in SEQ ID NO: 29; I at a residue corresponding to residue 129 in SEQ ID NO: 29; W at a residue corresponding to residue 185 in SEQ ID NO: 29; I at a residue corresponding to residue 190 in SEQ ID NO: 29; I at a residue corresponding to residue 225 in SEQ ID NO: 29; Y at a residue corresponding to residue 227 in SEQ ID NO: 29; L at a residue corresponding to residue 311 in SEQ ID NO: 29; G at a residue corresponding to residue 312 in SEQ ID NO: 29; T at a residue corresponding to residue 313 in SEQ ID NO: 29; P at a residue corresponding to residue 328 in SEQ ID NO: 29; W at a residue corresponding to residue 341 in SEQ ID NO: 29; H at a residue corresponding to residue 345 in SEQ ID NO: 29; C at a residue corresponding to residue 347 in SEQ ID NO: 29; R at a residue corresponding to residue 420 in SEQ ID NO: 29; D at a residue corresponding to residue 494 in SEQ ID NO: 29; C at a residue corresponding to residue 508 in SEQ ID NO: 29; and F at a residue corresponding to residue 550 in SEQ ID NO: 29.

### Alcohol Dehydrogenase (Adh)

[0067] As used in this disclosure “alcohol dehydrogenase (Adh)” refers to an enzyme that catalyzes the conversion of ethanol to acetaldehyde. An Adh may use isovaleraldehyde as a substrate. In some embodiments, Adh produces isopentanol from isovaleraldehyde.

[0068] In some embodiments, a host cell comprises an Adh enzyme and/or a heterologous polynucleotide encoding such an enzyme. In some embodiments, a host cell comprises a heterologous polynucleotide encoding an Adh enzyme comprising an amino acid sequence that is at least 80% (e.g., at least 80%, at least 85%, at least 90%, at least 91%, at least 92%, at least 93%, at least 94%, at least 95%, at least 96%, at least 97%, at least 98%, at least 99%, or 100%) identical to any one of SEQ ID NO: 20, 22, 24, or 645-700, an Adh enzyme in Table 3 or Table 6, or an Adh enzyme otherwise described in this disclosure. In some embodiments, a host cell comprises a heterologous polynucleotide that is at least 90% (e.g., at least 90%, at least 91%, at least 92%, at least 93%, at least 94%, at least 95%, at least 96%, at least 97%, at least 98%, at least 99%, or 100%) identical to any one of SEQ ID NO: 19, 21, 23 or 589-644, a polynucleotide encoding a Adh enzyme in Table 3 or Table 6, or an Adh enzyme otherwise described in this disclosure.

[0069] In some embodiments, a host cell comprises Adh from Saccharomyces cerevisiae. In other embodiments, a host cell does not comprise Adh from Saccharomyces cerevisiae.

[0070] Adh from Saccharomyces cerevisiae can comprises the amino acid sequence of UniProtKB—P00331 (SEQ ID NO: 31):

(SEQ ID NO: 31)
MSIPETQKAIIFYESNGKLEHKDIPVPKPKPNELLINVKYSGVCHTDLHA
WHGDWPLPTKLPLVGGHEGAGVVVGMGENVKGWKIGDYAGIKWLNGSCMA
CEYCELGNESNCPHADLSGYTHDGSFQEYATADAVQAAHIPQGTDLAEVA
PILCAGITVYKALKSANLRAGHWAAISGAAGGLGSLAVQYAKAMGYRVLG
IDGGPGKEELFTSLGGEVEIDFTKEKDIVSAVVKATNGGAHGIINVSVSE
AAIEASTRYCRANGTVVLVGLPAGAKCSSDVFNHVVKSISIVGSYVGNRA
DTREALDFFARGLVKSPIKVVGLSSLPEIYEKMEKGQIAGRYVVDTSK

[0071] In some embodiments, the amino acid sequence of SEQ ID NO: 3 μs encoded by the nucleic acid sequence:

(SEQ ID NO: 32)
ATGTCGATCCCAGAAACTCAGAAGGCTATTATATTTTATGAGTCAAACGG
CAAACTCGAACATAAAGACATTCCCGTGCCTAAACCGAAACCGAATGAAC
TTCTGATTAACGTAAAGTACAGCGGAGTCTGCCACACGGATTTGCATGCC
TGGCACGGGGATTGGCCGTTACCGACCAAACTGCCTCTGGTGGGTGGTCA
TGAGGGCGCGGGCGTTGTTGTGGGTATGGGAGAAAATGTCAAAGGCTGGA
AAATCGGCGACTATGCAGGGATCAAGTGGCTGAACGGGTCTTGTATGGCG
TGCGAGTACTGTGAATTAGGTAATGAATCCAACTGCCCACACGCAGATCT
GAGTGGTTATACCCATGACGGCAGCTTCCAAGAATACGCCACAGCGGATG
CCGTGCAGGCAGCTCACATTCCGCAAGGAACTGATCTTGCGGAAGTAGCC
CCAATTCTGTGCGCGGGCATCACGGTATATAAAGCTCTCAAAAGTGCAAA
CTTGCGCGCCGGTCATTGGGCTGCGATTTCGGGTGCCGCGGGCGGGCTGG
GATCATTAGCTGTTCAGTACGCGAAGGCAATGGGTTATCGAGTTCTGGGC
ATCGACGGCGGGCCCGGTAAAGAAGAGCTATTTACCAGCCTCGGCGGTGA
GGTCTTCATCGATTTTACCAAAGAAAAAGATATCGTGTCCGCAGTCGTGA
AAGCAACCAATGGCGGCGCTCACGGAATTATAAATGTGTCTGTATCAGAA
GCGGCGATTGAAGCCAGCACGCGTTATTGTCGCGCGAACGGCACAGTGGT
TCTGGTAGGCCTGCCCGCCGGTGCGAAATGTAGCTCGGACGTGTTCAATC
ATGTGGTGAAGAGTATTTCCATTGTTGGATCTTACGTAGGGAACCGTGCG
GATACGCGGGAGGCACTGGATTTTTTTGCAAGGGGCTTGGTTAAAAGCCC
GATCAAAGTCGTGGGTCTGTCGTCTCTACCTGAAATATATGAGAAAATGG
AAAAGGGACAGATCGCCGGACGCTACGTCGTCGACACCTCAAAGTGA

[0072] In some embodiments, a host cell that expresses a heterologous polynucleotide encoding an Adh enzyme may increase conversion of isovaleraldehyde to isopentanol by 0.5-fold, 1-fold, 1.5-fold, 2-fold, 2.5-fold, 3-fold, 3.5-fold, 4-fold, 4.5-fold, 5-fold, 5.5-fold, or 6-fold more (e.g., 2-fold to 6-fold more) relative to a control. In some embodiments, a control is a host cell that expresses a heterologous polynucleotide encoding SEQ ID NO: 31. In some embodiments, a control is a host cell that expresses a heterologous polynucleotide encoding SEQ ID NO: 31. In some embodiments, the control is an E. coli Nissle strain SYN1980 ΔleuE, ΔilvC, lacZ:tetR-Ptet-livKHMGF, tetR-Ptet-leuDH(Bc)-kivD-adh2-brnQ-rrnB ter (pSC101), such as is described in U.S. Patent Application Publication No. US20170232043.

[0073] In some embodiments, an Adh comprises a sequence that is at least 5%, at least 10%, at least 15%, at least 20%, at least 25%, at least 30%, at least 35%, at least 40%, at least 45%, at least 50%, at least 55%, at least 60%, at least 65%, at least 70%, at least 71%, at least 72%, at least 73%, at least 74%, at least 75%, at least 76%, at least 77%, at least 78%, at least 79%, at least 80%, at least 81%, at least 82%, at least 83%, at least 84%, at least 85%, at least 86%, at least 87%, at least 88%, at least 89%, at least 90%, at least 91%, at least 92%, at least 93%, at least 94%, at least 95%, at least 96%, at least 97%, at least 98%, at least 99%, or is 100% identical to SEQ ID NO: 31, any one of SEQ ID NO: 20, 22, 24, or 645-700, any one of SEQ ID NO: 19, 21, 23 or 589-644, an amino acid or polynucleotide sequence encoding a Adh enzyme in Table 3 or Table 6, or an Adh enzyme otherwise disclosed in this disclosure.

[0074] In some embodiments, an Adh comprises at least 1, at least 2, at least 3, at least 4, at least 5, at least 6, at least 7, at least 8, at least 9, at least 10, at least 11, at least 12, at least 13, at least, at least 15, at least 16, at least 17, at least 18, at least 19, at least 20, at least 21, at least 22, at least 23, at least 24, at least 25, at least 26, at least 27, at least 28, at least 29, at least 30, at least 31, at least 32, at least 33, at least 34, at least 35, at least 36, at least 37, at least 38, at least 39, at least 40, at least 41, at least 42, at least 43, at least 44, at least 45, at least 46, at least 47, at least 48, at least 49, at least 50, at least 60, at least 70, at least 80, at least 90, or at least 100 amino acid substitutions, deletions, insertions, or additions relative to SEQ ID NO: 31, any one of SEQ ID NO: 20, 22, 24, or 645-700, an Adh enzyme in Table 3 or Table 6, or an Adh enzyme otherwise disclosed in this disclosure.

[0075] In some embodiments, an Adh comprises P at a residue corresponding to residue 9 in SEQ ID NO: 31; G at a residue corresponding to residue 16 in SEQ ID NO: 31; Q at a residue corresponding to residue 23 in SEQ ID NO: 31; R at a residue corresponding to residue 28 in SEQ ID NO: 31; A at a residue corresponding to residue 30 in SEQ ID NO: 31; K at a residue corresponding to residue 93 in SEQ ID NO: 31; L at a residue corresponding to residue 98 in SEQ ID NO: 31; R at a residue corresponding to residue 99 in SEQ ID NO: 31; P at a residue corresponding to residue 114 in SEQ ID NO: 31; K at a residue corresponding to residue 115 in SEQ ID NO: 31; Y at a residue corresponding to residue 119 in SEQ ID NO: 31; Y at a residue corresponding to residue 194 in SEQ ID NO: 31; P at a residue corresponding to residue 242 in SEQ ID NO: 31; K at a residue corresponding to residue 249 in SEQ ID NO: 31; E at a residue corresponding to residue 255 in SEQ ID NO: 31; D at a residue corresponding to residue 260 in SEQ ID NO: 31; H at a residue corresponding to residue 269 in SEQ ID NO: 31; Q at a residue corresponding to residue 281 in SEQ ID NO: 31; L at a residue corresponding to residue 325 in SEQ ID NO: 31; M at a residue corresponding to residue 333 in SEQ ID NO: 31; P at a residue corresponding to residue 334 in SEQ ID NO: 31; and/or Q at a residue corresponding to residue 348 in SEQ ID NO: 31.

[0076] In some embodiments, an Adh comprises P at a residue corresponding to residue 9 in SEQ ID NO: 31; G at a residue corresponding to residue 16 in SEQ ID NO: 31; Q at a residue corresponding to residue 23 in SEQ ID NO: 31; R at a residue corresponding to residue 28 in SEQ ID NO: 31; A at a residue corresponding to residue 30 in SEQ ID NO: 31; K at a residue corresponding to residue 93 in SEQ ID NO: 31; L at a residue corresponding to residue 98 in SEQ ID NO: 31; R at a residue corresponding to residue 99 in SEQ ID NO: 31; P at a residue corresponding to residue 114 in SEQ ID NO: 31; K at a residue corresponding to residue 115 in SEQ ID NO: 31; Y at a residue corresponding to residue 119 in SEQ ID NO: 31; Y at a residue corresponding to residue 194 in SEQ ID NO: 31; P at a residue corresponding to residue 242 in SEQ ID NO: 31; K at a residue corresponding to residue 249 in SEQ ID NO: 31; E at a residue corresponding to residue 255 in SEQ ID NO: 31; D at a residue corresponding to residue 260 in SEQ ID NO: 31; H at a residue corresponding to residue 269 in SEQ ID NO: 31; Q at a residue corresponding to residue 281 in SEQ ID NO: 31; L at a residue corresponding to residue 325 in SEQ ID NO: 31; M at a residue corresponding to residue 333 in SEQ ID NO: 31; P at a residue corresponding to residue 334 in SEQ ID NO: 31; and Q at a residue corresponding to residue 348 in SEQ ID NO: 31.

### Branched-Chain Amino Acid Transport System 2 Carrier Protein (BrnQ)

[0077] As used in this disclosure “Branched-chain amino acid transport system 2 carrier protein (BrnQ)” refers to a component of the LIV-II transport system for branched-chain amino acids. BrnQ may be used to transport a branched-chain amino acid, e.g., leucine, into a cell such as a host cell.

[0078] In some embodiments, a host cell comprises a BrnQ protein and/or a heterologous polynucleotide encoding such a protein. In some embodiments, a host cell comprises a heterologous polynucleotide encoding a BrnQ protein comprising an amino acid sequence that is at least 80% (e.g., at least 80%, at least 85%, at least 90%, at least 91%, at least 92%, at least 93%, at least 94%, at least 95%, at least 96%, at least 97%, at least 98%, at least 99%, or 100%) identical to a BrnQ protein as described in this application, e.g., SEQ ID NO: 35. In some embodiments, the BrnQ protein comprises the amino acid sequence set forth in UniProtKB—B7MD59.

[0079] UniProtKB—B7MD59 has the amino acid sequence:

(SEQ ID NO: 35)
MTHQLRSRDIIALGFMTFALFVGAGNIIFPPMVGLQAGEHVWTAAFGFLI
TAVGLPVLTVVALAKVGGGVDSLSTPIGKVAGVLLATVCYLAVGPLFATP
RTATVSFEVGIAPLTGDSALPLFIYSLVYFAIVILVSLYPGKLLDTVGNF
LAPLKIIALVILSVAAIIWPAGSISTATEAYQNAAFSNGFVNGYLTMDTL
GAMVFGIVIVNAARSRGVTEARLLTRYTVWAGLMAGVGLTLLYLALFRLG
SDSASLVDQSANGAAILHAYVQHTFGGGGSFLLAALIFIACLVTAVGLTC
ACAEFFAQYVPLSYRTLVFILGGFSMVVSNLGLSQLIQISVPVLTAIYPP
CIALVVLSFTRSWWHNSSRVIAPPMFISLLFGILDGIKASAFSDILPSWA
QRLPLAEQGLAWLMPTVVMVVLAIIWDRAAGRQVTSSAH

[0080] In some embodiments, SEQ ID NO: 35 is encoded by the nucleic acid sequence:

(SEQ ID NO: 36)
ATGACCCATCAATTAAGATCGCGCGATATCATCGCTCTGGGCTTTATGAC
ATTTGCGTTGTTCGTCGGCGCAGGTAACATTATTTTCCCTCCAATGGTCG
GCTTGCAGGCAGGCGAACACGTCTGGACTGCGGCATTCGGCTTCCTCATT
ACTGCCGTTGGCCTACCGGTATTAACGGTAGTGGCGCTGGCAAAAGTTGG
CGGCGGTGTTGACAGTCTCAGCACGCCAATTGGTAAAGTCGCTGGCGTAC
TGCTGGCAACAGTTTGTTACCTGGCGGTGGGGCCGCTTTTTGCTACGCCG
CGTACAGCTACCGTTTCTTTTGAAGTGGGCATTGCGCCGCTGACGGGTGA
TTCCGCGCTGCCGCTGTTTATTTACAGCCTGGTCTATTTCGCTATCGTTA
TTCTGGTTTCGCTCTATCCGGGCAAGCTGCTGGATACCGTGGGCAACTTC
CTTGCGCCGCTGAAAATTATCGCGCTGGTCATCCTGTCTGTTGCCGCAAT
TATCTGGCCGGCGGGTTCTATCAGTACGGCGACTGAGGCTTATCAAAACG
CTGCGTTTTCTAACGGCTTCGTCAACGGCTATCTGACCATGGATACGCTG
GGCGCAATGGTGTTTGGTATCGTTATTGTTAACGCGGCGCGTTCTCGTGG
CGTTACCGAAGCGCGTCTGCTGACCCGTTATACCGTCTGGGCTGGCCTGA
TGGCGGGTGTTGGTCTGACTCTGCTGTACCTGGCGCTGTTCCGTCTGGGT
TCAGACAGCGCGTCGCTGGTCGATCAGTCTGCAAACGGTGCGGCGATCCT
GCATGCTTACGTTCAGCATACCTTTGGCGGCGGCGGTAGCTTCCTGCTGG
CGGCGTTAATCTTCATCGCCTGCCTGGTCACGGCGGTTGGCCTGACCTGT
GCTTGTGCAGAATTCTTCGCCCAGTACGTACCGCTCTCTTATCGTACGCT
GGTGTTTATCCTCGGCGGCTTCTCGATGGTGGTGTCTAACCTCGGCTTGA
GCCAGCTGATTCAGATCTCTGTACCGGTGCTGACCGCCATTTATCCGCCG
TGTATCGCACTGGTTGTATTAAGTTTTACACGCTCATGGTGGCATAATTC
GTCCCGCGTGATTGCTCCGCCGATGTTTATCAGCCTGCTTTTTGGTATTC
TCGACGGGATCAAGGCATCTGCATTCAGCGATATCTTACCGTCCTGGGCG
CAGCGTTTACCGCTGGCCGAACAAGGTCTGGCGTGGTTAATGCCAACAGT
GGTGATGGTGGTTCTGGCCATTATCTGGGATCGTGCGGCAGGTCGTCAGG
TGACCTCCAGCGCTCACTAA

### Variants

[0081] Variants of enzymes and proteins described in this disclosure (e.g., LeuDH, KivD, or Adh and including variants to nucleic acid and amino acid sequences) are also encompassed by the present disclosure. A variant may share at least 5%, at least 10%, at least 15%, at least 20%, at least 25%, at least 30%, at least 35%, at least 40%, at least 45%, at least 50%, at least 55%, at least 60%, at least 65%, at least 70%, at least 71%, at least 72%, at least 73%, at least 74%, at least 75%, at least 76%, at least 77%, at least 78%, at least 79%, at least 80%, at least 81%, at least 82%, at least 83%, at least 84%, at least 85%, at least 86%, at least 87%, at least 88%, at least 89%, at least 90%, at least 91%, at least 92%, at least 93%, at least 94%, at least 95%, at least 96%, at least 97%, at least 98%, at least 99%, or 100% sequence identity with a reference sequence, including all values in between.

[0082] Unless otherwise noted, the term “sequence identity,” as known in the art, refers to a relationship between the sequences of two polypeptides or polynucleotides, as determined by sequence comparison (alignment). In some embodiments, sequence identity is determined across the entire length of a sequence (e.g., LeuDH, KivD, or Adh sequence). In some embodiments, sequence identity is determined over a region (e.g., a stretch of amino acids or nucleic acids, e.g., the sequence spanning an active site) of a sequence (e.g., LeuDH, KivD, or Adh sequence).

[0083] Identity can also refer to the degree of sequence relatedness between two sequences as determined by the number of matches between strings of two or more residues (e.g., nucleic acid or amino acid residues). Identity measures the percent of identical matches between two or more sequences with gap alignments (if any) addressed by a particular mathematical model or computer program (e.g., algorithms).

[0084] Identity of related polypeptides or nucleic acid sequences can be readily calculated by any of the methods known to one of ordinary skill in the art. The “percent identity” of two sequences (e.g., nucleic acid or amino acid sequences) may, for example, be determined using the algorithm of Karlin and Altschul Proc. Natl. Acad. Sci. USA 87:2264-68, 1990, modified as in Karlin and Altschul Proc. Natl. Acad. Sci. USA 90:5873-77, 1993. Such an algorithm is incorporated into the NBLAST® and XBLAST® programs (version 2.0) of Altschul et al., J. Mol. Biol. 215:403-10, 1990. BLAST® protein searches can be performed, for example, with the XBLAST program, score=50, wordlength=3 to obtain amino acid sequences homologous to the proteins described in this application. Where gaps exist between two sequences, Gapped BLAST® can be utilized, for example, as described in Altschul et al., Nucleic Acids Res. 25(17):3389-3402, 1997. When utilizing BLAST® and Gapped BLAST® programs, the default parameters of the respective programs (e.g., XBLAST® and NBLAST®) can be used, or the parameters can be adjusted appropriately as would be understood by one of ordinary skill in the art.

[0085] Another local alignment technique which may be used, for example, is based on the Smith-Waterman algorithm (Smith, T. F. & Waterman, M. S. (1981) “Identification of common molecular subsequences.” J. Mol. Biol. 147:195-197). A general global alignment technique which may be used, for example, is the Needleman—Wunsch algorithm (Needleman, S. B. & Wunsch, C. D. (1970) “A general method applicable to the search for similarities in the amino acid sequences of two proteins.” J. Mol. Biol. 48:443-453), which is based on dynamic programming.

[0086] More recently, a Fast Optimal Global Sequence Alignment Algorithm (FOGSAA) was developed that purportedly produces global alignment of nucleic acid and amino acid sequences faster than other optimal global alignment methods, including the Needleman-Wunsch algorithm. In some embodiments, the identity of two polypeptides is determined by aligning the two amino acid sequences, calculating the number of identical amino acids, and dividing by the length of one of the amino acid sequences. In some embodiments, the identity of two nucleic acids is determined by aligning the two nucleotide sequences and calculating the number of identical nucleotide and dividing by the length of one of the nucleic acids.

[0087] For multiple sequence alignments, computer programs including Clustal Omega (Sievers et al., Mol Syst Biol. 2011 Oct. 11; 7:539) may be used.

[0088] In preferred embodiments, a sequence, including a nucleic acid or amino acid sequence, is found to have a specified percent identity to a reference sequence, such as a sequence disclosed in this application and/or recited in the claims when sequence identity is determined using the algorithm of Karlin and Altschul Proc. Natl. Acad. Sci. USA 87:2264-68, 1990, modified as in Karlin and Altschul Proc. Natl. Acad. Sci. USA 90:5873-77, 1993 (e.g., BLAST®, NBLAST®, XBLAST® or Gapped BLAST® programs, using default parameters of the respective programs).

[0089] In some embodiments, a sequence, including a nucleic acid or amino acid sequence, is found to have a specified percent identity to a reference sequence, such as a sequence disclosed in this application and/or recited in the claims when sequence identity is determined using the Smith-Waterman algorithm (Smith, T. F. & Waterman, M. S. (1981) “Identification of common molecular subsequences.” J. Mol. Biol. 147:195-197) or the Needleman-Wunsch algorithm (Needleman, S. B. & Wunsch, C. D. (1970) “A general method applicable to the search for similarities in the amino acid sequences of two proteins.” J. Mol. Biol. 48:443-453) using default parameters.

[0090] In some embodiments, a sequence, including a nucleic acid or amino acid sequence, is found to have a specified percent identity to a reference sequence, such as a sequence disclosed in this application and/or recited in the claims when sequence identity is determined using a Fast Optimal Global Sequence Alignment Algorithm (FOGSAA) using default parameters.

[0091] In some embodiments, a sequence, including a nucleic acid or amino acid sequence, is found to have a specified percent identity to a reference sequence, such as a sequence disclosed in this application and/or recited in the claims when sequence identity is determined using Clustal Omega (Sievers et al., Mol Syst Biol. 2011 Oct. 11; 7:539) using default parameters.

[0092] As used in this disclosure, a residue (such as a nucleic acid residue or an amino acid residue) in sequence “X” is referred to as corresponding to a position or residue (such as a nucleic acid residue or an amino acid residue) “Z” in a different sequence “Y” when the residue in sequence “X” is at the counterpart position of “Z” in sequence “Y” when sequences X and Y are aligned using amino acid sequence alignment tools known in the art, such as, for example, Clustal Omega or BLAST®.

[0093] As used in this disclosure, variant sequences may be homologous sequences. As used in this disclosure, homologous sequences are sequences (e.g., nucleic acid or amino acid sequences) that share a certain percent identity (e.g., at least 5%, at least 10%, at least 15%, at least 20%, at least 25%, at least 30%, at least 35%, at least 40%, at least 45%, at least 50%, at least 55%, at least 60%, at least 65%, at least 70%, at least 71%, at least 72%, at least 73%, at least 74%, at least 75%, at least 76%, at least 77%, at least 78%, at least 79%, at least 80%, at least 81%, at least 82%, at least 83%, at least 84%, at least 85%, at least 86%, at least 87%, at least 88%, at least 89%, at least 90%, at least 91%, at least 92%, at least 93%, at least 94%, at least 95%, at least 96%, at least 97%, at least 98%, at least 99%, or 100% percent identity, including all values in between). Homologous sequences include but are not limited to paralogous or orthologous sequences. Paralogous sequences arise from duplication of a gene within a genome of a species, while orthologous sequences diverge after a speciation event.

[0094] In some embodiments, a polypeptide variant (e.g., LeuDH, KivD, or Adh enzyme variant) comprises a domain that shares a secondary structure (e.g., alpha helix, beta sheet) with a reference polypeptide (e.g., a reference LeuDH, KivD, or Adh enzyme). In some embodiments, a polypeptide variant (e.g., LeuDH, KivD, or Adh enzyme variant) shares a tertiary structure with a reference polypeptide (e.g., a reference LeuDH, KivD, or Adh enzyme). As a non-limiting example, a variant polypeptide (e.g., LeuDH, KivD, or Adh enzyme variant) may have low primary sequence identity (e.g., less than 80%, less than 75%, less than 70%, less than 65%, less than 60%, less than 55%, less than 50%, less than 45%, less than 40%, less than 35%, less than 30%, less than 25%, less than 20%, less than 15%, less than 10%, or less than 5% sequence identity) compared to a reference polypeptide, but share one or more secondary structures (e.g., including but not limited to loops, alpha helices, or beta sheets), or have the same tertiary structure as a reference polypeptide. For example, a loop may be located between a beta sheet and an alpha helix, between two alpha helices, or between two beta sheets. Homology modeling may be used to compare two or more tertiary structures.

[0095] Any suitable method, including circular permutation (Yu and Lutz, Trends Biotechnol. 2011 January; 29(1):18-25), may be used to produce such variants. In circular permutation, the linear primary sequence of a polypeptide can be circularized (e.g., by joining the N-terminal and C-terminal ends of the sequence) and the polypeptide can be severed (“broken”) at a different location. Thus, the linear primary sequence of the new polypeptide may have low sequence identity (e.g., less than 80%, less than 75%, less than 70%, less than 65%, less than 60%, less than 55%, less than 50%, less than 45%, less than 40%, less than 35%, less than 30%, less than 25%, less than 20%, less than 15%, less than 10%, less or less than 5%, including all values in between) as determined by linear sequence alignment methods (e.g., Clustal Omega or BLAST). Topological analysis of the two polypeptides, however, may reveal that their tertiary structure is similar. Without being bound by a particular theory, a variant polypeptide created through circular permutation of a reference polypeptide and with a tertiary structure similar to the reference polypeptide can share similar functional characteristics (e.g., enzymatic activity, enzyme kinetics, substrate specificity or product specificity). In some instances, circular permutation may alter the secondary structure, tertiary structure or quaternary structure and produce an enzyme with different functional characteristics (e.g., increased or decreased enzymatic activity, different substrate specificity, or different product specificity). See, e.g., Yu and Lutz, Trends Biotechnol. 2011 January; 29(1):18-25.

[0096] It should be appreciated that in a protein that has undergone circular permutation, the linear amino acid sequence of the protein would differ from a reference protein that has not undergone circular permutation. However, one of ordinary skill in the art would be able to readily determine which residues in the protein that has undergone circular permutation correspond to residues in the reference protein that has not undergone circular permutation by, for example, aligning the sequences and detecting conserved motifs, and/or by comparing the structures or predicted structures of the proteins, e.g., by homology modeling. Variants described in this application include circularly permutated variants of sequences described in this application.

[0097] In some embodiments, an algorithm that determines the percent identity between a sequence of interest and a reference sequence described in this application accounts for the presence of circular permutation between the sequences. The presence of circular permutation may be detected using any method known in the art, including, for example, RASPODOM (Weiner et al., Bioinformatics. 2005 Apr. 1; 21(7):932-7). In some embodiments, the presence of circulation permutation is corrected for (e.g., the domains in at least one sequence are rearranged) prior to calculation of the percent identity between a sequence of interest and a sequence described in this application. The claims of this application should be understood to encompass sequences for which percent identity to a reference sequence is calculated after taking into account potential circular permutation of the sequence.

[0098] Functional variants of the recombinant LeuDH, KivD, or Adh enzyme disclosed in this application are also encompassed by the present disclosure. For example, functional variants may bind one or more of the same substrates or produce one or more of the same products. Functional variants may be identified using any method known in the art. For example, the algorithm of Karlin and Altschul Proc. Natl. Acad. Sci. USA 87:2264-68, 1990 described above may be used to identify homologous proteins with known functions.

[0099] Putative functional variants may also be identified by searching for polypeptides with functionally annotated domains. Databases including Pfam (Sonnhammer et al., Proteins. 1997 July; 28(3):405-20) may be used to identify polypeptides with a particular domain.

[0100] Homology modeling may also be used to identify amino acid residues that are amenable to mutation without affecting function. A non-limiting example of such a method may include use of position-specific scoring matrix (PSSM) and an energy minimization protocol.

[0101] Position-specific scoring matrix (PSSM) uses a position weight matrix to identify consensus sequences (e.g., motifs). PSSM can be conducted on nucleic acid or amino acid sequences. Sequences are aligned and the method takes into account the observed frequency of a particular residue (e.g., an amino acid or a nucleotide) at a particular position and the number of sequences analyzed. See, e.g., Stormo et al., Nucleic Acids Res. 1982 May 11; 10(9):2997-3011. The likelihood of observing a particular residue at a given position can be calculated. Without being bound by a particular theory, positions in sequences with high variability may be amenable to mutation (e.g., PSSM score ≥0) to produce functional homologs.

[0102] PSSM may be paired with calculation of a Rosetta energy function, which determines the difference between the wild-type and the single-point mutant. The Rosetta energy function calculates this difference as (ΔΔG_{calc}). With the Rosetta function, the bonding interactions between a mutated residue and the surrounding atoms are used to determine whether a mutation increases or decreases protein stability. For example, a mutation that is designated as favorable by the PSSM score (e.g. PSSM score ≥0), can then be analyzed using the Rosetta energy function to determine the potential impact of the mutation on protein stability. Without being bound by a particular theory, potentially stabilizing mutations are desirable for protein engineering (e.g., production of functional homologs). In some embodiments, a potentially stabilizing mutation has a ΔΔG_{calc} value of less than −0.1 (e.g., less than −0.2, less than −0.3, less than −0.35, less than −0.4, less than −0.45, less than −0.5, less than −0.55, less than −0.6, less than −0.65, less than −0.7, less than −0.75, less than −0.8, less than −0.85, less than −0.9, less than −0.95, or less than −1.0) Rosetta energy units (R.e.u.). See, e.g., Goldenzweig et al., Mol Cell. 2016 Jul. 21; 63(2):337-346. Doi: 10.1016/j.molcel.2016.06.012.

[0103] In some embodiments, a LeuDH, KivD, or Adh enzyme coding sequence comprises a mutation at 1, 2, 3, 4, 5, 6, 7, 8, 9, 10, 11, 12, 13, 14, 15, 16, 17, 18, 19, 20, 21, 22, 23, 24, 25, 26, 27, 28, 29, 30, 31, 32, 33, 34, 35, 36, 37, 38, 39, 40, 41, 42, 43, 44, 45, 46, 47, 48, 49, 50, 51, 52, 53, 54, 55, 56, 57, 58, 59, 60, 61, 62, 63, 64, 65, 66, 67, 68, 69, 70, 71, 72, 73, 74, 75, 76, 77, 78, 79, 80, 81, 82, 83, 84, 85, 86, 87, 88, 89, 90, 91, 92, 93, 94, 95, 96, 97, 98, 99, 100 or more than 100 positions corresponding to a reference (e.g., LeuDH, KivD, or Adh enzyme) coding sequence. In some embodiments, the LeuDH, KivD, or Adh enzyme coding sequence comprises a mutation in 1, 2, 3, 4, 5, 6, 7, 8, 9, 10, 11, 12, 13, 14, 15, 16, 17, 18, 19, 20, 21, 22, 23, 24, 25, 26, 27, 28, 29, 30, 31, 32, 33, 34, 35, 36, 37, 38, 39, 40, 41, 42, 43, 44, 45, 46, 47, 48, 49, 50, 51, 52, 53, 54, 55, 56, 57, 58, 59, 60, 61, 62, 63, 64, 65, 66, 67, 68, 69, 70, 71, 72, 73, 74, 75, 76, 77, 78, 79, 80, 81, 82, 83, 84, 85, 86, 87, 88, 89, 90, 91, 92, 93, 94, 95, 96, 97, 98, 99, 100 or more codons of the coding sequence relative to a reference (e.g., LeuDH, KivD, or Adh enzyme) coding sequence. As will be understood by one of ordinary skill in the art, a mutation within a codon may or may not change the amino acid that is encoded by the codon due to degeneracy of the genetic code. In some embodiments, the one or more mutations in the coding sequence do not alter the amino acid sequence of the coding sequence (e.g., LeuDH, KivD, or Adh enzyme) relative to the amino acid sequence of a reference polypeptide (e.g., LeuDH, KivD, or Adh enzyme).

[0104] In some embodiments, the one or more mutations in a recombinant LeuDH, KivD, or Adh enzyme sequence alters the amino acid sequence of the polypeptide (e.g., LeuDH, KivD, or Adh enzyme) relative to the amino acid sequence of a reference polypeptide (e.g., LeuDH, KivD, or Adh enzyme). In some embodiments, the one or more mutations alters the amino acid sequence of the recombinant polypeptide (e.g., LeuDH, KivD, or Adh enzyme) relative to the amino acid sequence of a reference polypeptide (e.g., LeuDH, KivD, or Adh enzyme) and alters (enhances or reduces) an activity of the polypeptide relative to the reference polypeptide.

[0105] The activity (e.g., specific activity) of any of the recombinant polypeptides described in this disclosure (e.g., LeuDH, KivD, or Adh enzyme) may be measured using routine methods. As a non-limiting example, a recombinant polypeptide's activity may be determined by measuring its substrate specificity, product(s) produced, the concentration of product(s) produced, or any combination thereof. As used in this disclosure, “specific activity” of a recombinant polypeptide refers to the amount (e.g., concentration) of a particular product produced for a given amount (e.g., concentration) of the recombinant polypeptide per unit time.

[0106] The skilled artisan will also realize that mutations in a recombinant polypeptide (e.g., LeuDH, KivD, or Adh enzyme) coding sequence may result in conservative amino acid substitutions to provide functionally equivalent variants of the foregoing polypeptides, e.g., variants that retain the activities of the polypeptides. As used in this disclosure, a “conservative amino acid substitution” refers to an amino acid substitution that does not alter the relative charge or size characteristics or functional activity of the protein in which the amino acid substitution is made.

[0107] In some instances, an amino acid is characterized by its R group (see, e.g., Table 1). For example, an amino acid may comprise a nonpolar aliphatic R group, a positively charged R group, a negatively charged R group, a nonpolar aromatic R group, or a polar uncharged R group. Non-limiting examples of an amino acid comprising a nonpolar aliphatic R group include alanine, glycine, valine, leucine, methionine, and isoleucine. Non-limiting examples of an amino acid comprising a positively charged R group include lysine, arginine, and histidine. Non-limiting examples of an amino acid comprising a negatively charged R group include aspartate and glutamate. Non-limiting examples of an amino acid comprising a nonpolar, aromatic R group include phenylalanine, tyrosine, and tryptophan. Non-limiting examples of an amino acid comprising a polar uncharged R group include serine, threonine, cysteine, proline, asparagine, and glutamine.

[0108] Variants can be prepared according to methods for altering polypeptide sequence known to one of ordinary skill in the art such as are found in references which compile such methods, e.g., Molecular Cloning: A Laboratory Manual, J. Sambrook, et al., eds., Fourth Edition, Cold Spring Harbor Laboratory Press, Cold Spring Harbor, N.Y., 2012, or Current Protocols in Molecular Biology, F. M. Ausubel, et al., eds., John Wiley & Sons, Inc., New York, 2010.

[0109] Non-limiting examples of functionally equivalent variants of polypeptides may include conservative amino acid substitutions in the amino acid sequences of proteins disclosed in this application. As used in this disclosure “conservative substitution” is used interchangeably with “conservative amino acid substitution” and refers to any one of the amino acid substitutions provided in Table 1.

[0110] In some embodiments, 1, 2, 3, 4, 5, 6, 7, 8, 9, 10, 11, 12, 13, 14, 15, 16, 17, 18, 19, 20 or more than 20 residues can be changed when preparing variant polypeptides. In some embodiments, amino acids are replaced by conservative amino acid substitutions.

TABLE 1
Conservative Amino Acid Substitutions.

| Original Residue | R Group Type | Conservative Amino Acid Substitutions |
|---|---|---|
| Ala | nonpolar aliphatic R group | Cys, Gly, Ser |
| Arg | positively charged R group | His, Lys |
| Asn | polar uncharged R group | Asp, Gln, Glu |
| Asp | negatively charged R group | Asn, Gln, Glu |
| Cys | polar uncharged R group | Ala, Ser |
| Gln | polar uncharged R group | Asn, Asp, Glu |
| Glu | negatively charged R group | Asn, Asp, Gln |
| Gly | nonpolar aliphatic R group | Ala, Ser |
| His | positively charged R group | Arg, Tyr, Trp |
| Ile | nonpolar aliphatic R group | Leu, Met, Val |
| Leu | nonpolar aliphatic R group | Ile, Met, Val |
| Lys | positively charged R group | Arg, His |
| Met | nonpolar aliphatic R group | Ile, Leu, Phe, Val |
| Pro | polar uncharged R group | |
| Phe | nonpolar aromatic R group | Met, Trp, Tyr |
| Ser | polar uncharged R group | Ala, Gly, Thr |
| Thr | polar uncharged R group | Ala, Asn, Ser |
| Trp | nonpolar aromatic R group | His, Phe, Tyr, Met |
| Tyr | nonpolar aromatic R group | His, Phe, Trp |
| Val | nonpolar aliphatic R group | Ile, Leu, Met, Thr |

[0111] Amino acid substitutions in the amino acid sequence of a polypeptide to produce a recombinant polypeptide (e.g., LeuDH, KivD, or Adh enzyme) variant having a desired property and/or activity can be made by alteration of the coding sequence of the polypeptide (e.g., LeuDH, KivD, or Adh enzyme). Similarly, conservative amino acid substitutions in the amino acid sequence of a polypeptide to produce functionally equivalent variants of the polypeptide typically are made by alteration of the coding sequence of the recombinant polypeptide (e.g., LeuDH, KivD, or Adh enzyme).

[0112] Mutations (e.g., substitutions) can be made in a nucleotide sequence by a variety of methods known to one of ordinary skill in the art. For example, mutations can be made by PCR-directed mutation, site-directed mutagenesis according to the method of Kunkel (Kunkel, Proc. Nat. Acad. Sci. U.S.A. 82: 488-492, 1985), by chemical synthesis of a gene encoding a polypeptide, by gene editing techniques, or by insertions, such as insertion of a tag (e.g., a HIS tag or a GFP tag).

### Nucleic Acids Encoding Branched-Chain Amino Acid (BCAA) Pathway Enzymes

[0113] Aspects of the present disclosure relate to recombinant enzymes, functional modifications and variants thereof, as well as uses relating thereto. For example, the enzymes and cells described in this application may be used to promote leucine consumption, e.g., by converting leucine to isopentanol. The methods may comprise using a host cell comprising one or more enzymes disclosed in this application, a cell lysate, isolated enzymes, or any combination thereof. Methods comprising recombinant expression of polynucleotides encoding an enzyme disclosed in this application in a host cell are encompassed by the present disclosure. Methods comprising administering a host cell comprising at least one BCAA pathway enzyme (e.g., LeuDH, KivD, or Adh enzyme) to a subject in need thereof are encompassed by the present disclosure. In vitro methods comprising reacting one or more branched-chain amino acids (BCAAs) in a reaction mixture with a BCAA pathway enzyme disclosed in this application are also encompassed by the present disclosure. In some embodiments, the BCAA pathway enzyme is an LeuDH, KivD, or Adh enzyme, or a combination thereof.

[0114] A nucleic acid encoding any one or more of the recombinant polypeptides (e.g., LeuDH, KivD, Adh, and/or BrnQ) is encompassed by the disclosure and may be comprised within a host cell. In some embodiments, the nucleic acid is in the form of an operon. In some embodiments, at least one ribosome binding site is present between one or more of the coding sequences present in the nucleic acid.

[0115] In some embodiments, LeuDH, KivD, Adh, and/or BrnQ nucleic acid sequences encompassed by the disclosure are nucleic acid sequences that hybridize to a LeuDH, KivD, Adh, and/or BrnQ nucleic acid sequence provided in this disclosure under high or medium stringency conditions and that are biologically active. For example, nucleic acids that hybridize under high stringency conditions of 0.2 to 1×SSC at 65° C. followed by a wash at 0.2×SSC at 65° C. to a nucleic acid encoding LeuDH, KivD, Adh, and/or BrnQ can be used. Nucleic acids that hybridize under low stringency conditions of 6×SSC at room temperature followed by a wash at 2×SSC at room temperature to a nucleic acid encoding LeuDH, KivD, Adh, and/or BrnQ can be used. Other hybridization conditions include 3×SSC at 40° C. or 50° C., followed by a wash in 1 or 2×SSC at 20° C., 30° C., 40° C., 50° C., 60° C., or 65° C.

[0116] Hybridizations can be conducted in the presence of formaldehyde, e.g., 10%, 20%, 30% 40% or 50%, which further increases the stringency of hybridization. Theory and practice of nucleic acid hybridization is described, e.g., in S. Agrawal (ed.) Methods in Molecular Biology, volume 20; and Tijssen (1993) Laboratory Techniques in biochemistry and molecular biology-hybridization with nucleic acid probes, e.g., part I chapter 2 “Overview of principles of hybridization and the strategy of nucleic acid probe assays,” Elsevier, New York provide a basic guide to nucleic acid hybridization. Exemplary proteins may have at least about 50%, 70%, 80%, 90%, preferably at least about 95%, even more preferably at least about 98% and most preferably at least 99% homology or identity with a LeuDH, KivD, or Adh protein or a domain thereof, e.g., the catalytic domain. Other exemplary proteins may be encoded by a nucleic acid that is at least about 90%, preferably at least about 95%, even more preferably at least about 98% and most preferably at least 99% homology or identity with a LeuDH, KivD, or Adh nucleic acid, e.g., those described in this application.

[0117] A nucleic acid encoding any one or more of the recombinant polypeptides (e.g., LeuDH, KivD, Adh and/or BrnQ) described in this application may be incorporated into any appropriate vector through any method known in the art. For example, the vector may be an expression vector, including but not limited to a viral vector (e.g., a lentiviral, retroviral, adenoviral, or adeno-associated viral vector), any vector suitable for transient expression, any vector suitable for constitutive expression, or any vector suitable for inducible expression (e.g., a galactose-inducible or doxycycline-inducible vector).

[0118] In some embodiments, a vector replicates autonomously in the cell. In some embodiments, a vector integrates into a chromosome within a cell. A vector can contain one or more endonuclease restriction sites that are cut by a restriction endonuclease to insert and ligate a nucleic acid containing a gene described in this application to produce a recombinant vector that is able to replicate in a cell. Vectors are typically composed of DNA, although RNA vectors are also available. Cloning vectors include, but are not limited to: plasmids, fosmids, phagemids, virus genomes and artificial chromosomes. As used in this application, the terms “expression vector” or “expression construct” refer to a nucleic acid construct, generated recombinantly or synthetically, with a series of specified nucleic acid elements that permit transcription of a particular nucleic acid in a host cell (e.g., microbe), such as a yeast cell. In some embodiments, the nucleic acid sequence of a gene described in this application is inserted into a cloning vector such that it is operably joined to regulatory sequences and, in some embodiments, expressed as an RNA transcript. In some embodiments, the vector contains one or more markers, such as a selectable marker as described in this application, to identify cells transformed or transfected with the recombinant vector. In some embodiments, the nucleic acid sequence of a gene described in this application is codon-optimized. Codon optimization may increase production of the gene product by at least 10%, at least 15%, at least 20%, at least 25%, at least 30%, at least 35%, at least 40%, at least 45%, at least 50%, at least 55%, at least 60%, at least 65%, at least 70%, at least 75%, at least 80%, at least 85%, at least 90%, at least 95%, or 100%, including all values in between) relative to a reference sequence that is not codon-optimized.

[0119] In some embodiments, nucleic acid sequences described in this application are expressed in plasmids. For example, nucleic acid sequences described in this application may be expressed in cloning plasmids. Nucleic acid sequences described in this application may be expressed in plasmids for transient expression. Nucleic acid sequences described in this application may also be expressed in plasmids for incorporation of the nucleic acid sequences into genomic DNA.

[0120] A coding sequence and a regulatory sequence are said to be “operably joined” or “operably linked” when the coding sequence and the regulatory sequence are covalently linked and the expression or transcription of the coding sequence is under the influence or control of the regulatory sequence. If the coding sequence is to be translated into a functional protein, the coding sequence and the regulatory sequence are said to be operably joined if induction of a promoter in the 5′ regulatory sequence permits the coding sequence to be transcribed and if the nature of the linkage between the coding sequence and the regulatory sequence does not (1) result in the introduction of a frame-shift mutation, (2) interfere with the ability of the promoter region to direct the transcription of the coding sequence, or (3) interfere with the ability of the corresponding RNA transcript to be translated into a protein.

[0121] In some embodiments, the nucleic acid encoding any one or more of the proteins described in this application is under the control of regulatory sequences (e.g., enhancer sequences). In some embodiments, a nucleic acid is expressed under the control of a promoter. The promoter can be a native promoter, e.g., the promoter of the gene in its endogenous context, which provides normal regulation of expression of the gene.

[0122] Alternatively, a promoter can be a promoter that is different from the native promoter of the gene, e.g., the promoter is different from the promoter of the gene in its endogenous context. In some embodiments, the promoter is a eukaryotic promoter. Non-limiting examples of eukaryotic promoters include TDH3, PGK1, PKC1, PDC1, TEF1, TEF2, RPL18B, SSA1, TDH2, PYK1,TPI1 GAL1, GAL10, GALT, GAL3, GAL2, MET3, MET25, HXT3, HXT7, ACT1, ADH1, ADH2, CUP1-1, ENO2, and SOD1, as would be known to one of ordinary skill in the art (see, e.g., Addgene website: blog.addgene.org/plasmids-101-the-promoter-region). In some embodiments, the promoter is a prokaryotic promoter (e.g., bacteriophage or bacterial promoter). Non-limiting examples of bacteriophage promoters include Pls1con, T3, T7, SP6, and PL. Non-limiting examples of bacterial promoters include Pbad, PmgrB, Ptrc2, PCI857, Plac/ara, Plac/fnr, Ptac, Ptet, Pcmt, and Pm.

[0123] In some embodiments, the promoter is an inducible promoter. As used in this application, an “inducible promoter” is a promoter controlled by the presence or absence of a molecule. This may be used, for example, to controllably induce the expression of an enzyme. In some embodiments, where an inducible promoter is linked to a LeuDH, a KivD and/or a Adh, the expression of LeuDH, KivD and/or Adh may be induced or not induced at certain times. For example, in some embodiments, expression may not be induced at certain times so that leucine consumption would be limited (e.g., during cell growth). Non-limiting examples of inducible promoters include chemically regulated promoters and physically regulated promoters. For chemically regulated promoters, the transcriptional activity can be regulated by one or more compounds, such as alcohol, tetracycline, galactose, a steroid, a metal, or other compounds. For physically regulated promoters, transcriptional activity can be regulated by a phenomenon such as light or temperature. Non-limiting examples of tetracycline-regulated promoters include anhydrotetracycline (aTc)-responsive promoters and other tetracycline-responsive promoter systems (e.g., a tetracycline repressor protein (tetR), a tetracycline operator sequence (tetO) and a tetracycline transactivator fusion protein (tTA)). Non-limiting examples of steroid-regulated promoters include promoters based on the rat glucocorticoid receptor, human estrogen receptor, moth ecdysone receptors, and promoters from the steroid/retinoid/thyroid receptor superfamily. Non-limiting examples of metal-regulated promoters include promoters derived from metallothionein (proteins that bind and sequester metal ions) genes. Non-limiting examples of pathogenesis-regulated promoters include promoters induced by salicylic acid, ethylene or benzothiadiazole (BTH). Non-limiting examples of temperature/heat-inducible promoters include heat shock promoters. Non-limiting examples of light-regulated promoters include light responsive promoters from plant cells. In certain embodiments, the inducible promoter is a galactose-inducible promoter. In some embodiments, the inducible promoter is induced by one or more physiological conditions (e.g., pH, temperature, radiation, osmotic pressure, saline gradients, cell surface binding, or concentration of one or more extrinsic or intrinsic inducing agents). Non-limiting examples of an extrinsic inducer or inducing agent include amino acids and amino acid analogs, saccharides and polysaccharides, nucleic acids, protein transcriptional activators and repressors, cytokines, toxins, petroleum-based compounds, metal containing compounds, salts, ions, enzyme substrate analogs, hormones or any combination thereof.

[0124] In some embodiments, the promoter is a constitutive promoter. As used in this application, a “constitutive promoter” refers to an unregulated promoter that allows continuous transcription of a gene. Non-limiting examples of a constitutive promoter include TDH3, PGK1, PKC1, PDC1, TEF1, TEF2, RPL18B, SSA1, TDH2, PYK1,TPI1, HXT3, HXT7, ACT1, ADH1, ADH2, ENO2, and SOD1.

[0125] Other inducible promoters or constitutive promoters known to one of ordinary skill in the art are also contemplated in this application.

[0126] The precise nature of the regulatory sequences needed for gene expression may vary between species or cell types, but generally include, as necessary, 5′ non-transcribed and 5′ non-translated sequences involved with the initiation of transcription and translation respectively, such as a TATA box, capping sequence, CAAT sequence, and the like. In particular, such 5′ non-transcribed regulatory sequences will include a promoter region which includes a promoter sequence for transcriptional control of the operably joined gene. Regulatory sequences may also include enhancer sequences or upstream activator sequences. The vectors disclosed in this application may include 5′ leader or signal sequences. Regulatory sequences may also include a terminator sequence. In some embodiments, a terminator sequence marks the end of a gene in DNA during transcription. The choice and design of one or more appropriate vectors suitable for inducing expression of one or more genes described in this application in a heterologous organism is within the ability and discretion of one of ordinary skill in the art.

[0127] Expression vectors containing the necessary elements for expression are commercially available and known to one of ordinary skill in the art (see, e.g., Sambrook et al., Molecular Cloning: A Laboratory Manual, Fourth Edition, Cold Spring Harbor Laboratory Press, 2012).

### Host Cells

[0128] The disclosed methods and compositions and host cells are exemplified with E. coli cells (e.g., E. coli Nissle 1917), but are, in some embodiments, applicable to other host cells.

[0129] Suitable host cells include, but are not limited to: yeast cells, bacterial cells, algal cells, plant cells, fungal cells, insect cells, and animal cells, including mammalian cells. In one illustrative embodiment, suitable host cells include E. coli (e.g., Shuffle™ competent E. coli available from New England BioLabs in Ipswich, Mass. or E. coli Nissle 1917 available from German Collection of Microorganisms and Cell Cultures (DSMZ Braunschweig, E. coli DSM 6601)).

[0130] Suitable yeast host cells include, but are not limited to: Candida, Hansenula, Saccharomyces, Schizosaccharomyces, Pichia, Kluyveromyces, and Yarrowia. In some embodiments, the yeast cell is Hansenula polymorpha, Saccharomyces cerevisiae, Saccaromyces carlsbergensis, Saccharomyces diastaticus, Saccharomyces norbensis, Saccharomyces kluyveri, Schizosaccharomyces pombe, Pichia pastoris, Pichia finlandica, Pichia trehalophila, Pichia kodamae, Pichia membranaefaciens, Pichia opuntiae, Pichia thermotolerans, Pichia salictaria, Pichia quercuum, Pichia pijperi, Pichia stipitis, Pichia methanolica, Pichia angusta, Kluyveromyces lactis, Candida albicans, or Yarrowia lipolytica.

[0131] In some embodiments, the yeast strain is an industrial polyploid yeast strain. Other non-limiting examples of fungal cells include cells obtained from Aspergillus spp., Penicillium spp., Fusarium spp., Rhizopus spp., Acremonium spp., Neurospora spp., Sordaria spp., Magnaporthe spp., Allomyces spp., Ustilago spp., Botrytis spp., and Trichoderma spp.

[0132] In certain embodiments, the host cell is an algal cell such as Chlamydomonas (e.g., C. Reinhardtii) and Phormidium (P. sp. ATCC29409).

[0133] In other embodiments, the host cell is a prokaryotic cell. Suitable prokaryotic cells include gram positive, gram negative, and gram-variable bacterial cells. The host cell may be a species of, but not limited to: Agrobacterium, Alicyclobacillus, Anabaena, Anacystis, Acinetobacter, Acidothermus, Arthrobacter, Azobacter, Bacillus, Bifidobacterium, Brevibacterium, Butyrivibrio, Buchnera, Campestris, Campylobacter, Clostridium, Corynebacterium, Chromatium, Coprococcus, Escherichia, Enterococcus, Enterobacter, Erwinia, Fusobacterium, Faecalibacterium, Francisella, Flavobacterium, Geobacillus, Haemophilus, Helicobacter, Klebsiella, Lactobacillus, Lactococcus, Ilyobacter, Micrococcus, Microbacterium, Mesorhizobium, Methylobacterium, Methylobacterium, Mycobacterium, Neisseria, Pantoea, Pseudomonas, Prochlorococcus, Rhodobacter, Rhodopseudomonas, Rhodopseudomonas, Roseburia, Rhodospirillum, Rhodococcus, Scenedesmus, Streptomyces, Streptococcus, Synecoccus, Saccharomonospora, Saccharopolyspora, Staphylococcus, Serratia, Salmonella, Shigella, Thermoanaerobacterium, Tropheryma, Tularensis, Temecula, Thermosynechococcus, Thermococcus, Ureaplasma, Xanthomonas, Xylella, Yersinia, and Zymomonas.

[0134] In some embodiments, the bacterial host strain is an industrial strain. Numerous bacterial industrial strains are known and suitable for the methods and compositions described in this application.

[0135] In some embodiments, the bacterial host cell is of the Agrobacterium species (e.g., A. radiobacter, A. rhizogenes, A. rubi), the Arthrobacterspecies (e.g., A. aurescens, A. citreus, A. globformis, A. hydrocarboglutamicus, A. mysorens, A. nicotianae, A. paraffineus, A. protophonniae, A. roseoparaffinus, A. sulfureus, A. ureafaciens), the Bacillus species (e.g., B. thuringiensis, B. anthracis, B. megaterium, B. subtilis, B. lentus, B. circulars, B. pumilus, B. lautus, B. coagulans, B. brevis, B. firmus, B. alkaophius, B. licheniformis, B. clausii, B. stearothermophilus, B. halodurans and B. amyloliquefaciens. In particular embodiments, the host cell will be an industrial Bacillus strain including but not limited to B. subtilis, B. pumilus, B. licheniformis, B. megaterium, B. clausii, B. stearothermophilus and B. amyloliquefaciens. In some embodiments, the host cell will be an industrial Clostridium species (e.g., C. acetobutylicum, C. tetani E88, C. lituseburense, C. saccharobutylicum, C. perfringens, C. beijerinckii). In some embodiments, the host cell will be an industrial Corynebacterium species (e.g., C. glutamicum, C. acetoacidophilum). In some embodiments, the host cell will be an industrial Escherichia species (e.g., E. coli). In some embodiments, the host cell will be an industrial Erwinia species (e.g., E. uredovora, E. carotovora, E. ananas, E. herbicola, E. punctata, E. terreus). In some embodiments, the host cell will be an industrial Pantoea species (e.g., P. citrea, P. agglomerans). In some embodiments, the host cell will be an industrial Pseudomonas species, (e.g., P. putida, P. aeruginosa, P. mevalonii). In some embodiments, the host cell will be an industrial Streptococcus species (e.g., S. equisimiles, S. pyogenes, S. uberis). In some embodiments, the host cell will be an industrial Streptomyces species (e.g., S. ambofaciens, S. achromogenes, S. avermitilis, S. coelicolor, S. aureofaciens, S. aureus, S. fungicidicus, S. griseus, S. lividans). In some embodiments, the host cell will be an industrial Zymomonas species (e.g., Z. mobilis, Z. lipolytica), and the like.

[0136] The present disclosure is also suitable for use with a variety of animal cell types, including mammalian cells, for example, human (including 293, HeLa, WI38, PER.C6 and Bowes melanoma cells), mouse (including 3T3, NS0, NS1, Sp2/0), hamster (CHO, BHK), monkey (COS, FRhL, Vero), and hybridoma cell lines.

[0137] In various embodiments, strains that may be used in the practice of the disclosure including both prokaryotic and eukaryotic strains, and are readily accessible to the public from a number of culture collections such as American Type Culture Collection (ATCC), Deutsche Sammlung von Mikroorganismen and Zellkulturen GmbH (DSM), Centraalbureau Voor Schimmelcultures (CBS), and Agricultural Research Service Patent Culture Collection, Northern Regional Research Center (NRRL). The present disclosure is also suitable for use with a variety of plant cell types.

[0138] The term “cell,” as used in this application, may refer to a single cell or a population of cells, such as a population of cells belonging to the same cell line or strain. Use of the singular term “cell” should not be construed to refer explicitly to a single cell rather than a population of cells. The host cell may comprise genetic modifications relative to a wild-type counterpart.

[0139] A vector encoding any one or more of the recombinant polypeptides (e.g., LeuDH, KivD, Adh enzyme and/or BrnQ) described in this application may be introduced into a suitable host cell using any method known in the art. Host cells may be cultured under any conditions suitable as would be understood by one of ordinary skill in the art. For example, any media, temperature, and incubation conditions known in the art may be used. For host cells carrying an inducible vector, cells may be cultured with an appropriate inducible agent to promote expression.

[0140] Any of the cells disclosed in this application can be cultured in media of any type (rich or minimal) and any composition prior to, during, and/or after contact and/or integration of a nucleic acid. The conditions of the culture or culturing process can be optimized through routine experimentation as would be understood by one of ordinary skill in the art. In some embodiments, the selected media is supplemented with various components. In some embodiments, the concentration and amount of a supplemental component is optimized. In some embodiments, other aspects of the media and growth conditions (e.g., pH, temperature, etc.) are optimized through routine experimentation. In some embodiments, the frequency that the media is supplemented with one or more supplemental components, and the amount of time that the cell is cultured, is optimized.

[0141] Culturing of the cells described in this application can be performed in culture vessels known and used in the art. In some embodiments, an aerated reaction vessel (e.g., a stirred tank reactor) is used to culture the cells. In some embodiments, a bioreactor or fermentor is used to culture the cell. Thus, in some embodiments, the cells are used in fermentation. As used in this application, the terms “bioreactor” and “fermentor” are interchangeably used and refer to an enclosure, or partial enclosure, in which a biological, biochemical and/or chemical reaction takes place, involving a living organism or part of a living organism. A “large-scale bioreactor” or “industrial-scale bioreactor” is a bioreactor that is used to generate a product on a commercial or quasi-commercial scale. Large scale bioreactors typically have volumes in the range of liters, hundreds of liters, thousands of liters, or more.

[0142] In some embodiments, a bioreactor comprises a cell (e.g., a bacterial cell) or a cell culture (e.g., a bacterial cell culture), such as a cell or cell culture described in this application. In some embodiments, a bioreactor comprises a spore and/or a dormant cell type of an isolated microbe (e.g., a dormant cell in a dry state).

[0143] Non-limiting examples of bioreactors include: stirred tank fermentors, bioreactors agitated by rotating mixing devices, chemostats, bioreactors agitated by shaking devices, airlift fermentors, packed-bed reactors, fixed-bed reactors, fluidized bed bioreactors, bioreactors employing wave induced agitation, centrifugal bioreactors, roller bottles, and hollow fiber bioreactors, roller apparatuses (for example benchtop, cart-mounted, and/or automated varieties), vertically-stacked plates, spinner flasks, stirring or rocking flasks, shaken multi-well plates, MD bottles, T-flasks, Roux bottles, multiple-surface tissue culture propagators, modified fermentors, and coated beads (e.g., beads coated with serum proteins, nitrocellulose, or carboxymethyl cellulose to prevent cell attachment).

[0144] In some embodiments, the bioreactor includes a cell culture system where the cell (e.g., bacterial cell) is in contact with moving liquids and/or gas bubbles. In some embodiments, the cell or cell culture is grown in suspension. In other embodiments, the cell or cell culture is attached to a solid phase carrier. Non-limiting examples of a carrier system includes microcarriers (e.g., polymer spheres, microbeads, and microdisks that can be porous or non-porous), cross-linked beads (e.g., dextran) charged with specific chemical groups (e.g., tertiary amine groups), 2D microcarriers including cells trapped in nonporous polymer fibers, 3D carriers (e.g., carrier fibers, hollow fibers, multicartridge reactors, and semi-permeable membranes that can comprising porous fibers), microcarriers having reduced ion exchange capacity, encapsulation cells, capillaries, and aggregates. In some embodiments, carriers are fabricated from materials such as dextran, gelatin, glass, or cellulose.

[0145] In some embodiments, industrial-scale processes are operated in continuous, semi-continuous or non-continuous modes. Non-limiting examples of operation modes are batch, fed batch, extended batch, repetitive batch, draw/fill, rotating-wall, spinning flask, and/or perfusion mode of operation. In some embodiments, a bioreactor allows continuous or semi-continuous replenishment of the substrate stock, for example a carbohydrate source and/or continuous or semi-continuous separation of the product, from the bioreactor.

[0146] In some embodiments, the bioreactor or fermentor includes a sensor and/or a control system to measure and/or adjust reaction parameters. Non-limiting examples of reaction parameters include biological parameters (e.g., growth rate, cell size, cell number, cell density, cell type, or cell state, etc.), chemical parameters (e.g., pH, redox-potential, concentration of reaction substrate and/or product, concentration of dissolved gases, such as oxygen concentration and CO₂ concentration, nutrient concentrations, metabolite concentrations, concentration of an oligopeptide, concentration of an amino acid, concentration of a vitamin, concentration of a hormone, concentration of an additive, serum concentration, ionic strength, concentration of an ion, relative humidity, molarity, osmolarity, concentration of other chemicals, for example buffering agents, adjuvants, or reaction by-products), physical/mechanical parameters (e.g., density, conductivity, degree of agitation, pressure, and flow rate, shear stress, shear rate, viscosity, color, turbidity, light absorption, mixing rate, conversion rate, as well as thermodynamic parameters, such as temperature, light intensity/quality, etc.). Sensors to measure the parameters described in this application are well known to one of ordinary skill in the relevant mechanical and electronic arts. Control systems to adjust the parameters in a bioreactor based on the inputs from a sensor described in this application are well known to one of ordinary skill in the art in bioreactor engineering.

[0147] In some embodiments, the method involves batch fermentation (e.g., shake flask fermentation). General considerations for batch fermentation (e.g., shake flask fermentation) include the level of oxygen and glucose. For example, batch fermentation (e.g., shake flask fermentation) may be oxygen and glucose limited, so in some embodiments, the capability of a strain to perform in a well-designed fed-batch fermentation is underestimated. Also, the final product may display some differences from the substrate in terms of solubility, toxicity, cellular accumulation and secretion and in some embodiments can have different fermentation kinetics.

[0148] In some embodiments, the cells of the present disclosure are adapted to consume leucine in vivo. In some embodiments, the cells are adapted to produce one or more enzymes for leucine consumption via conversion to isopentanol (e.g., LeuDH, KivD, and/or Adh). In such embodiments, the enzyme can catalyze reactions for the consumption of leucine by bioconversion in an in vitro or ex vivo process.

[0149] Any of the proteins or enzymes of the present disclosure may be expressed in a host cell. As used in this application, a host cell is a cell that can be used to express at least one heterologous polynucleotide (e.g., encoding a protein or enzyme as described in this application). The term “heterologous” with respect to a polynucleotide, such as a polynucleotide comprising a gene, is used interchangeably with the term “exogenous” and the term “recombinant” and refers to: a polynucleotide that has been artificially supplied to a biological system; a polynucleotide that has been modified within a biological system, or a polynucleotide whose expression or regulation has been manipulated within a biological system. A heterologous polynucleotide that is introduced into or expressed in a host cell may be a polynucleotide that comes from a different organism or species than the host cell, or may be a synthetic polynucleotide, or may be a polynucleotide that is also endogenously expressed in the same organism or species as the host cell. For example, a polynucleotide that is endogenously expressed in a host cell may be considered heterologous when it is situated non-naturally in the host cell; expressed recombinantly in the host cell, either stably or transiently; modified within the host cell; selectively edited within the host cell; expressed in a copy number that differs from the naturally occurring copy number within the host cell; or expressed in a non-natural way within the host cell, such as by manipulating regulatory regions that control expression of the polynucleotide. In some embodiments, a heterologous polynucleotide is a polynucleotide that is endogenously expressed in a host cell but whose expression is driven by a promoter that does not naturally regulate expression of the polynucleotide. In other embodiments, a heterologous polynucleotide is a polynucleotide that is endogenously expressed in a host cell and whose expression is driven by a promoter that does naturally regulate expression of the polynucleotide, but the promoter or another regulatory region is modified. In some embodiments, the promoter is recombinantly activated or repressed. For example, gene-editing based techniques may be used to regulate expression of a polynucleotide, including an endogenous polynucleotide, from a promoter, including an endogenous promoter. See, e.g., Chavez et al., Nat Methods. 2016 July; 13(7): 563-567. A heterologous polynucleotide may comprise a wild-type sequence or a mutant sequence as compared with a reference polynucleotide sequence.

[0150] Any suitable host cell may be used to produce any of the recombinant polypeptides (e.g., LeuDH, KivD, and/or Adh) disclosed in this application, including eukaryotic cells or prokaryotic cells.

### Compositions

[0151] The present disclosure provides compositions, including pharmaceutical compositions, comprising a host cell described in this application (e.g., a host cell comprising a heterologous polynucleotide encoding at least one enzyme selected from the group consisting of LeuDH, KivD, and Adh) or one or more enzymes described in this application (e.g., LeuDH, KivD, and/or Adh), and optionally a pharmaceutically acceptable excipient.

[0152] In certain embodiments, a host cell described in this application is provided in an effective amount in a composition, such as a pharmaceutical composition. In certain embodiments, one or more enzymes described in this application are provided in an effective amount in a composition, such as a pharmaceutical composition. In certain embodiments, the effective amount is a therapeutically effective amount. In certain embodiments, the effective amount is a prophylactically effective amount. In some embodiments, the effective amount is an amount that is sufficient to treat or ameliorate one or more symptoms of MSUD.

[0153] In certain embodiments, the subject is an animal. In certain embodiments, the subject is a human. In other embodiments, the subject is a non-human animal. In certain embodiments, the subject is a mammal. In certain embodiments, the subject is a non-human mammal. In some embodiments, the subject is a non-mammal. In certain embodiments, the subject is a domesticated animal, such as a dog, cat, cow, pig, horse, sheep, chicken or goat. In certain embodiments, the subject is a companion animal, such as a dog or cat. In certain embodiments, the subject is a livestock animal, such as a cow, pig, horse, sheep, chicken, or goat. In certain embodiments, the subject is a zoo animal. In another embodiment, the subject is a research animal, such as a rodent (e.g., mouse, rat), dog, pig, or non-human primate.

[0154] Compositions, such as pharmaceutical compositions, described in this application can be prepared by any method known in the art. In general, such preparatory methods include bringing a compound described in this application (e.g., the “active ingredient”) into association with a carrier or excipient, and/or one or more other accessory ingredients, and then, if necessary and/or desirable, shaping, and/or packaging the product into a desired single- or multi-dose unit.

### Methods

[0155] In some aspects, the disclosure provides methods of using host cells. In some embodiments, the disclosure provides a method comprising culturing a host cell described in this application (e.g., a host cell comprising a heterologous polynucleotide encoding at least one enzyme selected from the group consisting of LeuDH, KivD, and Adh). Methods for culturing cells are described elsewhere in this application. In some embodiments, the disclosure provides a method of producing isopentanol from leucine comprising culturing a host cell described in this application (e.g., a host cell comprising a heterologous polynucleotide encoding LeuDH, KivD, and Adh). In some embodiments, the production and culturing occurs in vivo, e.g., in a human subject that has been administered the host cell. In some embodiments, the production occurs ex vivo, e.g., in an in vitro cell culture environment. Compositions, cells, enzymes, and methods described in this application are also applicable to industrial settings, including any application wherein there may be a buildup of branched-chain amino acids (e.g., leucine, isoleucine, and valine).

[0156] The present invention is further illustrated by the following Examples, which in no way should be construed as limiting. The entire contents of all of the references (including literature references, issued patents, published patent applications, and co pending patent applications) cited throughout this application are hereby expressly incorporated by reference. If a reference incorporated in this application contains a term whose definition is incongruous or incompatible with the definition of same term as defined in the present disclosure, the meaning ascribed to the term in this disclosure shall govern. However, mention of any reference, article, publication, patent, patent publication, and patent application cited in this application is not, and should not be taken as an acknowledgment or any form of suggestion that they constitute valid prior art or form part of the common general knowledge in any country in the world.

### EXAMPLES

[0157] In order that the invention described in this application may be more fully understood, the following examples are set forth. The examples described in this application are offered to illustrate the systems and methods provided in this application and are not to be construed in any way as limiting their scope.

### Example 1: Enzyme Library Design and Synthesis

### Materials and Methods

### Metagenomic Enzyme Discovery

[0158] Machine-learning-based bioinformatics tools were used to identify enzyme candidates for each of the three desired activities (leucine dehydrogenase, 1.4.1.9; ketoisovalerate decarboxylase, 4.1.1.1; and alcohol dehydrogenase 1.1.1.1) in public sequence databases (SwissProt and TrEMBL, together known as UniProt). For LeuDH and Adh, sequence diversity was maximized using previously developed algorithms. For KivD, a stratified sampling approach was used. The total number of enzyme candidates were 1175 LeuDH sequences, 1296 KivD sequences and 1177 Adh sequences.

### Rational Enzyme Design

[0159] For LeuDH and Adh, molecular models of the enzyme—transition state complex were built using Rosetta software, and systematic mutations of the active site residues to each of the 20 amino acids were designed.

### Library Synthesis

[0160] DNA sequences for all LeuDH, KivD, and Adh enzymes were codon optimized for expression in E. coli. Coding sequences were synthesized in an inducible E. coli expression vector under the control of the T7 promoter.

### Results

[0161] To improve the leucine-consuming branched-chain amino acid (BCAA) pathway, experiments were performed to identify LeuDH, KivD, and Adh enzymes with superior activity relative to parent enzymes in a prototype strain (1980, also known as SYN1980), which parent strain included Bacillus cereus LeuDH, Lactococcus lactis KivD, and Saccharomyces cerevisiae ADH2. The prototype strain also included BrnQ from E. coli, which is a transporter for branched-chain amino acids that can transport branched-chain amino acids, such as leucine, into the cell. The parent LeuDH enzyme exhibited substrate promiscuity, deaminating valine and isoleucine in addition to leucine. To improve specific consumption of leucine by the BCAA pathway, an additional goal for the pathway design was to identify LeuDH enzymes with increased specificity for leucine (Leu) relative to valine (Val) and isoleucine (Ile).

[0162] Two complementary approaches were used to design a library for each enzyme family (LeuDH, KivD, and Adh): metagenomic sourcing and rational design (Table 2). For each enzyme, a metagenomic library of >1000 enzymes was designed to sample the full metagenomic sequence space available in sequence databases (FIGS. 1A-1C). For the LeuDH and Adh libraries, available structural data was used for rational design of the B. cereus LeuDH and S. cerevisiae Adh enzymes. Enzyme sequences for all libraries were optimized for expression in E. coli and synthesized in an inducible E. coli expression vector and transformed into E. coli for high throughput screening.

TABLE 2
Enzyme library composition.

| | | | | | | Total |
|---|---|---|---|---|---|---|
| Library | Bacteria | Fungi | Animal | Plant | Rational | Designs |
| LeuDH | 1129 | 11 | 23 | 12 | 270 | 1445 |
| KivD | 783 | 508 | 1 | 4 | 0 | 1296 |
| Adh | 654 | 273 | 128 | 122 | 140 | 1317 |

### Example 2: Characterization of Pathway Enzyme Libraries

### Materials and Methods

### Cell Growth and Enzyme Preparation

[0163] For each of the enzyme libraries screened, strains harboring library plasmids were transformed into E. coli T7 expression host cells. 5 μL/well of thawed glycerol stocks were stamped into 500 μL/well of LB+100 ug/mL Carbenicillin (LB-Carb100) in half-height deepwell plates, which were sealed with AeraSeals. Samples were incubated at 37° C. and shaken at 1000 RPM in 80% humidity overnight. 50 μL/well of the resulting precultures were stamped into 450 μL/well of LB-Carb100+1 mM IPTG in half-height deepwell plates, which were sealed with AeraSeals. Samples were incubated at 30° C. and shaken at 1000 RPM in 80% humidity overnight. 250 μL/well of the resulting production cultures were stamped into deepwell plates containing 500 uL of phosphate buffered saline (PBS) and centrifuged for 10 minutes at 4000*G. Supernatant was removed and the resulting cell pellet was resuspended in 200 μL of BugBuster Protein Extraction Reagent+1 μL/mL purified Benzonase+1 μL/6 mL purified Lysozyme. Samples were incubated for 10 minutes at room temperature to generate the cell lysates used in in vitro enzyme assays.

### LeuDH Activity Assay

[0164] 10 μL of lysate for the LeuDH library strains was transferred to a half-area flat-bottom plate containing 90 μL/well assay buffer (20 mM amino acid [L-Leucine, L-Valine, or L-Isoleucind 200 mM Glycine, 200 mM KCl, 0.4 mM NAD, pH 10.5). Optical measurements were taken on a plate reader, with absorbance readings taken at 340 nm for 10 minutes. The resulting kinetic data was used to resolve the maximum rate of NAD+ reduction, a proxy for LeuDH activity.

### KivD Activity Assay

[0165] 10 μL of lysate for the KivD library strains was transferred to a half-area flat-bottom plate containing 90 μL/well assay buffer (100 mM PIPES-KOH, 100 mM Potassium glutamate, 1 mM Dithiothreitol, 0.4 mM NAD, 1.5 mM Thiamine pyrophosphate, 10 mM Magnesium glutamate, 20 mM ketoisocaproate (KIC), pH 7.5). A coupling enzyme was used to indirectly measure KivD activity on KIC. Optical absorbance measurements were taken over 10 minutes. The resulting kinetic data was used to determine KivD activity.

### Adh Activity Assay

[0166] 10 μL of lysate for the Adh library strains was transferred to a half-area flat-bottom plate containing 90 μL/well assay buffer (50 mM MOPS buffer, 0.4 mM NADH, and 30 mM isovaleraldehyde, pH 7.0). Optical absorbance measurements were taken on a plate reader at 340 nm for 10 minutes. The resulting kinetic data was used to resolve the maximum rate of NADH oxidation, a proxy for ADH activity.

### LeuDH Selectivity Assay

[0167] To measure LeuDH selectivity (specific deamination of L-Leu in the presence L-Ile and L-Val), lysate was diluted four-fold in lysis buffer, and 10 μL/well of the newly diluted lysate was stamped into 90 μL/well of a modified assay buffer from above, featuring 0.5 mM of each amino acid (L-leucine, L-isoleucine, L-valine), 200 mM Glycine, 200 mM Potassium chloride, and 4 mM NAD. The reaction was quenched at different timepoints and submitted for LC-MS quantification of leucine, isoleucine, and valine.

### Results

[0168] To screen the 3×˜1300-member enzyme libraries, high-throughput (HTP) methods were developed to screen for LeuDH, KivD, and Adh enzyme activities in E. coli cell lysates. In brief, strains were cultivated in 96-deepwell plates to induce protein production, with positive and negative control strains included in each plate. Cells were lysed, and enzyme activity was measured in cell lysates using the enzyme-specific spectrophotometric assays described herein. Enzyme assays were executed on a fully automated robotic workcell. For each enzyme family, the full library (˜1300 members each) was measured in biological duplicate, and 50-200 enzymes with the highest activity in each enzyme family were selected as primary “hits” for that family. The primary hits were re-screened in a secondary screen with additional replication (4 biological replicates) to validate the enzyme rankings.

### Leucine Dehydrogenase (LeuDH)

[0169] A total of 1378 LeuDH enzymes were first screened for the ability to deaminate Leu. An initial round of screening identified 220 enzymes (Table 4) with activity similar to or better than the parent LeuDH enzyme from B. subtilis. These primary hits were further analyzed in a secondary screen (FIG. 2). In the secondary screen, LeuDH enzymes with up to 1.8-fold increase in LeuDH activity on Leu were validated.

[0170] Activity was calculated as: Enzyme Activity divided by Background Enzyme Activity minus 1. Controls were set to 0, and strains with values >0 were considered as potential hits. The value represents a fractional improvement over the control. As a non-limiting example, strains with a 50% improvement would be indicated in Table 4 with a value of 0.5.

[0171] To determine if any of the primary LeuDH hits exhibited increased specificity for Leu over Ile and Val, all 220 primary hits were also screened for activity on Val and Be. Specificity was measured as the ratio of activity on Leu to the activity on Be or Val. As shown in FIG. 3, enzymes that were hits from the primary screen exhibited up to ˜2.7-fold preference for Leu over Val, and up to a 5-fold preference for Leu over Ile. The positive control B. cereus LeuDH showed equal preference for Leu, Val, and Ile when measured in this assay.

[0172] A trade-off of Leu specificity for Leu activity was observed in this library, where the most specific LeuDH enzymes were not the most active LeuDH enzymes. By comparing specificity for Leu/Ile to Leu/Val, hits with increased specificity for Leu relative to both Leu and Val were identified (FIG. 4). The control B. cereus LeuDH exhibited approximately equal preference for Leu, Val, and Ile.

### Ketoisovalerate Decarboxylase (KivD)

[0173] A total of 1248 KivD enzymes were screened for the decarboxylase activity on ketoisocaproate. An initial round of screening identified 55 enzymes (Table 5) with higher activity than the parent KivD enzyme from S. aureus, which did not exhibit activity greater than the background lysate decarboxylase activity in this assay and was equated to the non-zero measurable background activity. These primary KivD hits were further analyzed in a secondary screen (FIG. 5) (Table 5). In the secondary screen, >40 KivD enzymes with at least 6- to 8-fold increase in KivD activity relative to the background lysate activity in this assay were identified. KivD activity was calculated as: Enzyme Activity divided by Background Enzyme Activity minus 1.

### Alcohol Dehydrogenase (Adh)

[0174] A total of 1215 Adh enzymes were screened for the ability to reduce isovaleraldehyde to isopentanol. An initial round of screening identified 55 enzymes (Table 6) with higher activity than the parent ADH2 enzyme from S. cerevisiae, which did not exhibit activity greater than the background lysate alcohol dehydrogenase activity in this assay and was equated to the non-zero measurable background activity. Because activity of the ADH2 enzyme for S. cerevisiae was indistinguishable from the background activity of the lysate, an Equus caballus Adh with activity higher than the background activity was used as a positive control for the screen. These primary hits were further analyzed in a secondary screen (FIG. 6) (Table 6). In the secondary screen, 5 Adh enzymes with at least 20-fold increase in Adh activity relative to the background lysate activity were identified. The ADH2 enzyme for S. cerevisiae was used as a control for the secondary screen. Adh activity was calculated as: Enzyme Activity divided by Background Enzyme Activity minus 1.

### Example 3: Selectivity of Top LeuDH Candidate Enzymes

### Materials and Methods

### LeuDH Selectivity Assay

[0175] To measure LeuDH selectivity (specific deamination of L-Leu in the presence L-Ile and L-Val), lysate was diluted four-fold in lysis buffer, and 10 μL/well of the newly diluted lysate was stamped into 90 μL/well of a modified assay buffer from above, featuring 0.5 mM of each amino acid (L-leucine, L-isoleucine, L-valine), 200 mM Glycine, 200 mM Potassium chloride, and 4 mM NAD. The reaction was quenched at different time points and submitted for LC-MS quantification of leucine, isoleucine, and valine.

### Results

[0176] LeuDH catalyzes the deamination of Leu, Val and Be, and as a consequence all substrates have the potential to act as competitors in an in vivo context where substrate pools are mixed. In order to better predict the performance of the top LeuDH hits with regard to mixed-substrate pools, the selectivity of LeuDH enzymes for Leu (i.e., the preference of LeuDH for Leu when Leu, Val, and Ile are all present in the reaction mixture) was measured. A total of 21 LeuDH enzymes were screened in cell lysate assays similar to the HTP screen, except that the reaction mixture contained Leu, Val, and Ile at 1:1:1 molar ratio. Rate of Leu, Val, and Ile disappearance was monitored in the reaction mixture. FIG. 7 shows consumption of Leu, Ile, and Val within the reaction mixture for each LeuDH enzyme. At least 10 LeuDH enzymes showed improved preference for Leu over Val and Be when compared to the parent B. subtilis LeuDH. For nearly all LeuDH enzymes, least preference was shown for valine.

### Example 4: Pathway Enzyme Hit Selection and Operon Assembly

[0177] To improve the overall Leu consumption of the BCAA pathway, multiple enzymes for each step that demonstrated superior performance relative to the parent enzyme were selected. For LeuDH, 6 hits were selected based on two criteria: enzyme activity on Leu and specificity for Leu relative to Val and Ile. Because LeuDH selectivity analysis was run in parallel to operon assembly, the selectivity data set did not factor into LeuDH selection. For KivD and ADH, 3 hits were selected for each enzyme family based on in vitro enzyme activity. In total, 12 enzymes were advanced to the final operon design (Table 3). The operon was composed of four coding sequences for enzymes in the following order: LeuDH-KivD-Adh-BrnQ. A preferred operon for Leu consumption was selected and further tested as described below.

TABLE 3
Enzymes selected for advancement to operon design.

| | | | SEQ ID NO | SEQ ID NO |
|---|---|---|---|---|
| Enzyme | Identifier | Source | (Nucleic Acid) | (Amino Acid) |
| LeuDH | t160946 | Cetobacterium ceti | 1 | 2 |
| LeuDH | t160389 | Hymenobacter daecheongensis | 3 | 4 |
| LeuDH | t160283 | Hymenobacter sp. CRA2 | 5 | 6 |
| LeuDH | t160434 | Arenimonas sp SCN 70-307 | 7 | 8 |
| LeuDH | t160048 | Candidatus kapabacteria sp. 59-99 | 9 | 10 |
| LeuDH | t160141 | Peptococcaceae bacterium CEB 3 | 11 | 12 |
| KivD | t163988 | Candida auris | 13 | 14 |
| KivD | t164076 | Bacillus sp. FJ AT-1801 | 15 | 16 |
| KivD | t163842 | Erwinia iniecta | 17 | 18 |
| Adh | t159319 | Tortispora caseinolytica NRRL Y- | 19 | 20 |
| | | 17797 | | |
| Adh | t159028 | Rhizobiales bacterium NRL2 | 21 | 22 |
| Adh | t158538 | Alcanivorax dieselolei | 23 | 24 |

### Example 5: Operon Testing

### Materials and Methods

### Cell Preparation

[0178] Branched-chain amino acid (BCAA) pathway operon plasmids were transformed into E. coli Nissle strain 1917, which was purchased from the German Collection of Microorganisms and Cell Cultures (DSMZ Braunschweig, E. coli DSM 6601). Transformed cells were thawed on ice and cell density was measured by light absorption at 600 nm (OD₆₀₀). OD₆₀₀ of 1.0 was assumed to be equal to 10⁹ cells/mL in this method. A volume was calculated to target 1 mL of 2×10⁹ cells/mL cell resuspension, and the cells were transferred into a 96-deep well plate and washed once with cold PBS. After centrifugation (4000 rpm, 4° C., 10 min), the PBS was discarded, and the cell pellets were then resuspended in 1 mL of 1×M9+50 mM MOPS+0.5% glucose (MMG) buffer. Eight hundred (800) μL of each sample was transferred into a new 96-deep well plate and 800 μL of MMG containing 16 mM leucine was added, mixed well by pipetting. A sample (200 μL) assigned as time zero was collected at this moment. The plate was then covered by a breathable membrane and moved to an anaerobic chamber to incubate at 37° C. Samples were also collected at 2 hours and 4 hours during incubation in the anaerobic chamber. The samples were centrifuged for 10 minutes at 4000 rpm at 4° C. immediately after collection. 100 μL of the supernatant was transferred into a new 96-well plate and stored at −80° C. for future analysis.

### Leucine Activity Assay

[0179] Leucine was quantitated in bacterial supernatant by liquid chromatography coupled to tandem mass spectrometry (LC-MS/MS) using either an Ultimate 3000 UHPLC-TSQ Quantum or a Vanquish UHPLC-TSQ Altis system. Samples were extracted with 9 parts 2:1 acetonitrile:water containing 1 μg/mL leucine-d3 as an internal standard, vortexed, and centrifuged. Supernatants were diluted with 9 parts 0.1% formic acid and analyzed concurrently with standards processed as above from 0.8 to 1000 μg/mL. Samples were separated on a Phenominex Synergi 4 um Hydro-RP 80A, 75×2 mm using a 0.1% formic acid (A), 0.1% formic acid/acetonitrile (B) at 0.3 mL/min and 50 degrees C. After a 2 μL injection and an initial 5% B hold from 0 to 0.5 minutes, analytes were gradient eluted from 5 to 90% B over 0.5 to 1.5 minutes followed by high organic wash and aqueous equilibration steps. Analytes were detected using Selected Reacting Monitoring (SRM) of compound specific collision induced fragments in electrospray positive ion mode (leucine: 132>86, isoleucine: leucine-d3: 135>89). SRM chromatograms were integrated, and the unknown/internal standard peak area ratios were used to calculate concentrations against the standard curve.

### Results

[0180] The top Leu consuming operons identified through HTP screening were transformed into E. coli Nissle 1917 (and labeled as strain 5941, 5942 and 5943) and compared to the prototype strain 1980. Strain 5941 contains the LeuDH enzyme of Cetobacterium ceti, the KivD enzyme of Erwinia iniecta, and the Adh enzyme of Alcanivorax dieselolei. Strain 5942 has the LeuDH enzyme of Cetobacterium ceti, the KivD enzyme of Erwinia iniecta, and the Adh enzyme of Rhizobiales bacterium NRL2. Strain 5943 has LeuDH enzyme of Cetobacterium ceti, the KivD enzyme of Erwinia iniecta, and the Adh enzyme of Rhizobiales bacterium NRL2. The operons further contain BrnQ of E. coli. The prototype strain contains Bacillus cereus LeuDH, Lactococcus lactis KivD, Saccharomyces cerevisiae ADH2, as well as E. coli BrnQ.

[0181] Samples from the top Leu consuming operons and the prototype strain were analyzed for Leu consumption (FIG. 8). The top Leu consuming operon-containing strains (5941, 5942 and 5943) were found to consume Leu at a significantly faster rate than the prototype strain (1980).

### Example 6: Engineering of LeuDH Enzymes and Bioinformatics Analysis of Active LeuDH Enzymes

[0182] As shown in Table 4, mutants of UniProt P0A392 (SEQ ID NO: 27) from Bacillus cereus were generated and tested to determine whether the mutants showed improved activity or enzyme expression relative to UniProt P0A392 (SEQ ID NO: 27). The LeuDH activity assay described in Example 2 was used. Point mutations at the following unique positions were observed to improve either activity or enzyme expression: 42, 43, 44, 67, 71, 76, 78, 113, 115, 116, 136, 293, 296, 297, and 300.

[0183] The following point mutations in UniProt P0A392 (SEQ ID NO: 27) were observed to improve either activity or protein expression: A115N, A115Q, A115S, A115T, A115V, A297C, A297D, A297E, A297F, A297H, A297K, A297L, A297M, A297N, A297Q, A297R, A297T, A297W, A297Y, E116A, E116L, E116M, E116N, E116R, E116S, E116V, E116W, G43E, G43F, G43T, G43W, G43Y, G44H, G44I, G44K, G44Y, 1113F, 1113M, 1113Q, 1113V, 1113W, 1113Y, L300A, L300C, L300D, L300F, L300H, L300K, L300M, L300N, L300Q, L300R, L300S, L300T, L300W, L300Y, L42A, L42Q, L42T, L76E, L76F, L76H, L761, L76K, L76M, L76R, L76S, L76T, L76W, L76Y, L78C, L78F, L78H, L78K, L78Q, L78V, L78Y, M67A, M67E, M67K, M67Q, M67S, M67T, N71C, N71D, N71H, N71K, N71M, N71T, T136E, T136F, T136L, T136R, T136S, T136Y, V293A, V293C, V293Q, V293S, V293T, V296A, V296C, V296E, V296I, V296K, V296L, V296N, V296S, and V296T.

[0184] Bioinformatics analysis was conducted on mutants of SEQ ID NO: 27 and sequences from a metagenomic library that were hits. A list of unique residues found in hits is provided below in Table 7. The corresponding position in SEQ ID NO: 27 is shown. A hit is a LeuDH that has increased activity (greater than 0) relative to SEQ ID NO: 27. For each position in the multiple sequence alignment, individual residue identities were binned into hits and non-hits, and the set difference was calculated. These are residues that are unique to the hit set, either via the systematic point mutation library or the metagenomic sequences.

### Example 7: Bioinformatics Analysis of Active KivD Enzymes

[0185] Bioinformatics analysis was conducted on hit KivD enzymes that showed increased activity relative to SEQ ID NO: 29. A list of unique residues found in hits is provided in Table 8. For each position in the multiple sequence alignment, individual residue identities were binned into hits and non-hits, and the set difference was calculated. These are residues that were unique to the hit set. The corresponding position in SEQ ID NO: 29 is indicated in Table 8.

[0186] UniProt Q684J7, from Lactococcus lactis, is a microbe widely used in the production of buttermilk and cheese. While not the named reaction for natural enzymes, KivD catalyzes the decarboxylation of 4-methyl-2-oxopentanoate to form isopentanol. It was found that hits from the KivD enzyme library have broadened substrate specificity beyond their natural substrate, which is α-ketoisovalerate.

### Example 8: Bioinformatics Analysis of Active ADH Enzymes

[0187] Bioinformatics analysis was conducted on hit ADH enzymes that showed increased activity relative to SEQ ID NO: 31. A list of unique residues found in hits is provided in Table 9. For each position in the multiple sequence alignment, individual residue identities were binned into hits and non-hits, and the set difference was calculated. These are residues that were unique to the hit set. The corresponding position in SEQ ID NO: 31 is indicated in Table 9.

### Example 9: Molar Balance Closure of the Isopentanol Pathway

[0188] The performance and molar balance closure of the isopentanol pathway in strain 5941 was assessed in AMBR® 15 bioreactors. Strain 5941 comprises the LeuDH enzyme of SEQ ID NO: 2, the KivD enzyme of SEQ ID NO: 18, and the Adh enzyme of SEQ ID NO: 24. The reactors were filled to 17 mL with M9 media with 0.5% glucose, 10 mM Leu, 10 mM Val, and 5 mM Ile. Conditions were controlled with 0% dissolved oxygen and pH at 7.0. Activated biomass was inoculated to an OD600 of 1, and samples of the supernatant were taken over time to monitor metabolite concentrations.

[0189] The extracellular concentration profiles of pathway intermediates are shown in FIG. 10. Over the course of 180 minutes, 4.1±0.3 mM of Leucine was consumed and 4.4±0.5 mM of isopentanol accumulated in the media. The keto-acid (2-oxoisocaproate) and aldehyde (isovaleraldehyde) were not observed in the supernatant. Thus, the flux through the pathway is balanced and accounted for. This is also shown by the conservation of total moles of the pathway intermediates (data corresponding to “Sum” in FIG. 10).

### Methods—Fermentation

[0190] The assay was performed in an AMBR15f, microbioreactor system from Sartorius. The vessels were filled with 17mls of 1×m9 media salts, supplemented with 2.0 mm MgSO4, 0.1 mM CaCl, 5% glucose, 10 mM L-leucine, 5 mM L-isoleucine, and 10 mM valine. The vessels were filled 18 hrs prior to inoculation, to enable both the pH and DO optodes to hydrate. The temperature in the reactors was kept at 37° C., the pH was maintained at 7 using 2N NaOH, and the dissolved oxygen was kept at 0 using a 0.14vvm N2 flow rate. The agitation was set to 500 RPM to enable good mixing throughout the experiment. The bioreactors were inoculated to an OD600 of 1, from activated biomass supplied by Synlogic. The bioreactors were sampled at 0, 30, 90, 150, and 180 minutes post inoculation. Samples were immediately centrifuged at 15000×g for 30secs in a microcentrifuge and the supernatant was removed for analysis. Supernatants were stored at −20° C. until ready for analysis.

### Methods—Analytics

[0191] Analytics were developed for two methods. One method involved liquid chromatography mass spectrometry (LCMS) for the quantification of leucine (Leu), ketoisocaproate acid (Leu acid), and isovaleraldehyde (Leu aldehyde). This method was also validated and used for quantification of valine and isoleucine (and their respective acid and aldehyde products). The second method involved gas chromatography mass spectrometry (GCMS) for the quantification of isopentanol (Leu alcohol). Together, these analytical methods allowed for quantitation of all pathway intermediates for strain 5941. The GCMS method was also validated and used for quantification of valine and isoleucine alcohol products.

[0192] LCMS analysis was performed on a Thermo Ultimate 3000 UPLC system with a Thermo Q-Exactive quadrupole-orbitrap mass detector and a Thermo Accucore PFP column (2.1×100 mm, 2.6 μm packing) using the following elution solvents: A=0.1% formic acid and 0.1% TFA in water; B=0.1% formic acid in acetonitrile. The gradient was at 0.5 mL/min of 1% B in A for 60 seconds, followed by a linear ramp from 1% to 40% B in A over 270 seconds. The column was then flushed with 95% B in A for 60 seconds, and re-equilibrated with 1% B in A for 180 seconds. MS acquisition was from 0.8 to 5.3 minutes.

[0193] Column effluent was introduced into the mass spectrometer via a standard Thermo ESI source with positive mode ionization at +3800V, vaporizer temperature of 400° C., and ion transfer tube temperature of 375° C. Thermo reports gas flow rates in arbitrary units probably approximating L/min at STP. Set points were: sheath gas, 60; aux gas, 30; sweep gas, 1. To increase data acquisition rate, orbitrap resolution was set to 17,500. Quadrupole resolution was 1 m/z.

[0194] This method also derivatizes both aldehydes and keto acids, improving the stability of those analytes. Numerous derivatizing agents were explored, and it was found that 2-(Dimethylamino)ethylhydrazine in methanol resulted in the best sensitivity in positive mode. A buffer of 0.5M acetic acid and 0.5M sodium acetate in methanol was used for the quantification of LEU ACID and LEU ALDEHYDE, while also measuring non-derivatized LEU.

[0195] GC-MS analysis was performed on an Agilent GCMS/MSD with a Gerstel autosampler, using a J&W DB-WAX GC Column (15m) and chloroform as the extraction solvent. Front injector was set at 250° C. and a flow rate of 1 mL/min. The oven temperature held at 40° C. for 1 minute, followed by a ramp to 130° C. (15° C./min), and then ramped up to 200° C. (65° C./min). Ms acquisition scan window was at 40-150 mz, with the MS source and MS quad at 250C and 200C respectively.

[0196] To facilitate high throughput and automation, a Gerstel autosampler was used to inject the extracted bottom chloroform layer in a 96 well plate format with the aqueous ambr15 culture matrix on top acting as an overlay to prevent product evaporation. To account for any other potential alcohol product evaporation, 2-heptanol was added to the chloroform as an internal.

Sequences for Enzymes in Table 3

LeuDH (Identifier: t160946; Accession: A0A1T4PGG9)
ATGAACATCTTCAAGAAAATGGAGGAATTTAATTATGAACAACTGGTCTACTTCTACGACAGCGAAACGGAACTC
AAAGGTATTACCTGTATACACAACACAACTTTAGGGCCGGCATTGGGCGGTACCCGCCTTTGGAACTATAACTCT
GAGGAAGATGCCGTTGAAGACGTAATCCGTCTGGCTCGGGGCATGACTTACAAAGCGGCTTGCGCCGGTCTGAAT
CTGGGCGGCGGTAAAACCGTGCTGATCGGTGATGCTAAAAAGATTAAATCAGAGTCCTACTTCCGTGGACTGGGG
CGCTACGTTCAGTCGCTGAACGGCAGATATATCACCGCGGAAGACGTAAATACTTCTACGAAGGATATGGCATAC
GTTGCTATGGAAACTGACTATGTGGTAGGCCTGGGAGGTAAATCCGGCAACCCTAGTCCAGTTACTGCTTACGGT
GCATTTATGGGTATCAAAGCGGCGCTGATGAAAAAATTTGAGGATAGCTCTATTGAAGGCCGAACCTTCGCAGTG
CAGGGTGCTGGGCAGACGGGTTACTATCTTATCGATTACCTCCTAGGCAACAACAAGTTCAAAGAAAAGGCTAAA
AAAATTTACTTCACCGAAATTAACGAGAGCTATATCGAGCGTATGAACAAAGAACATCCGGAAGTTGAATTTATT
TCCCCGGACAAAATCTACTCGCTGGAAGTAGACGTCTTCGTGCCCTGCGCCCTGGGCAAAATCGTTAATGACAAA
ACTATCGATGAATTTAAGTGTCCGATCATCGCAGGTACTGCAAACAACGTACTGGAAAGGGAAGCGCACGGCAAC
ATGCTTAAAGAACGTGGCATTCTTTACGCCCCGGACTATGTGATCAATGCTGGTGGGCTGATCAACGTTTACCAC
GAGCTGAACGGTTACAATAAAGAGAACGCTATTCTGGAAGTGGAATTAATTTATGATCGCCTACTGGAAATATTC
AACATCGCTGATTCTCTGAACATCAGCACCAATATCGCTGCCAACGAGTTCGCGGAAAAACGTATCAAGCAAATT
AAGTCCTTGAAAAACAACTTCATTAAACGC (SEQ ID NO: 1)
MNIFKKMEEFNYEQLVYFYDSETELKGITCIHNTTLGPALGGTRLWNYNSEEDAVEDVIRLARGMTYKAACAGLN
LGGGKTVLIGDAKKIKSESYFRGLGRYVQSLNGRYITAEDVNTSTKDMAYVAMETDYVVGLGGKSGNPSPVTAYG
AFMGIKAALMKKFEDSSIEGRTFAVQGAGQTGYYLIDYLLGNNKFKEKAKKIYFTEINESYIERMNKEHPEVEFI
SPDKIYSLEVDVFVPCALGKIVNDKTIDEFKCPIIAGTANNVLEREAHGNMLKERGILYAPDYVINAGGLINVYH
ELNGYNKENAILEVELIYDRLLEIFNIADSLNISTNIAANEFAEKRIKQIKSLKNNFIKR (SEQ ID NO: 2)
LeuDH (Identifier: t160389; Accession: A0A1M6BE59)
ATGGTAGAGATCAAGGCTTTGACGGACACTTCCGTGTTTGGGCAAATTGCAGAACACCAGCATGAACAGGTCGTT
TTCTGCCACGATCACGAAACCGGCCTCCGTGCGATCATCGGTATTCATAACACAGTTCTTGGCCCCGCCTTAGGT
GGAACTCGCATGTGGCACTATGCTTCTGACGCAGAGGCGCTGAATGATGTTCTGCGTCTGTCGCGCGGTATGACC
TACAAAGCTGCTATAAGTGGCCTGAACCTGGGTGGCGGTAAAGCAGTGATCATTGGGGACGCCAAAACCCTGAAA
ACCGAAGCGCTGCTGCGGAAGTTCGGCAGATTCGTAAAAAACCTGAATGGTAAATACATCACTGCTGAAGATGTC
AACATGACTACAAAAGACATGGAGTACATCAGGATGGAAACCAAGCACGTTGCTGGCTTACCTGAATCAATGGGT
GGAAGCGGTGATCCGTCCCCGGTGACTGCATTTGGTACGTATATGGGCATGAAAGCGGCGGCCAAAAAAGCGTTC
GGCTCTGACTCTCTGGCTGGCAAACGTATCGCTGTTCAGGGTGTAGGTCATGTCGGCACTTACCTGTTGGAGTAT
TTGCAGAAGGAAGGTGCTAAGCTGGTACTGACTGACTACTATGAAGATCGTGCCCTGGAGGCAGCAACGCGTTTT
GGCGCAAAAATGGTTGGCCTGGACGAAATTTACGATCAAGACGTTGATATCTACAGTCCATGTGCTCTTGGAGCT
ACCATTAACGATGACACTATCGGTCGCCTGAAATGCCAGGTTATCGCTGGTTGCGCAAACAACCAGCTGCAAAAC
GAAAATGTGCATGGCCCGGCCCTCGTGGAGCGCGGGATTGTGTACGCTCCGGATTTCCTGATCAACGCCGGCGGC
CTGATCAACGTTTACTCGGAAGTAGTGGGTAGCTCCCGTCAGGGTGCTTTGAACCAGACCGAAAAAATTTTCGAC
ATCACCACTCAGGTTCTAAACAAAGCGGAACAAGAGGGTTCTCACCCGCAGGCGGCAGCTACTAAGCAGGCTGAA
GAGCGTATTGCAAGCCTGGGCAAAGTTAAGAGCACCTAC(SEQ ID NO: 3)
MVEIKALTDTSVFGQIAEHQHEQVVFCHDHETGLRAIIGIHNTVLGPALGGTRMWHYASDAEALNDVLRLSRGMT
YKAAISGLNLGGGKAVIIGDAKTLKTEALLRKFGRFVKNLNGKYITAEDVNMTTKDMEYIRMETKHVAGLPESMG
GSGDPSPVTAFGTYMGMKAAAKKAFGSDSLAGKRIAVQGVGHVGTYLLEYLQKEGAKLVLTDYYEDRALEAATRF
GAKMVGLDEIYDQDVDIYSPCALGATINDDTIGRLKCQVIAGCANNQLQNENVHGPALVERGIVYAPDFLINAGG
LINVYSEVVGSSRQGALNQTEKIFDITTQVLNKAEQEGSHPQAAATKQAEERIASLGKVKSTY
(SEQ ID NO: 4)
LeuDH (Identifier: t160283; Accession: A0A1S9B636)
ATGGTAGAGATCCAGGCTTTGCCGGAAACTTCCATTTTTGGGCAAATCGCAGACCACCAGCATGAACAGGTGGTC
TTCTGCCACGATCACGAAACCGGCCTCCGTGCGATAATCGGTATTCATAACACGGTTCTTGGCCCCGCCTTAGGT
GGAACTCGCATGTGGCACTATGCTACCGAGGCAGAAGCGCTGAATGACGTTCTGCGTCTGTCTCGCGGTATGACC
TACAAGGCTGCTATCTCGGGCCTGAACCTGGGTGGCGGTAAAGCAGTAATCATTGGGGATGCCAAAACAATCAAA
ACCGAAGCGCTGCTGCGGAAATTCGGCAGATTCGTGCAGAACCTGAATGGTAAATACATCACTGCTGAAGACGTT
AACATGACTACAAAGGATATGGAGTACATTAGGATGGAAACCAAACACGTCGCTGGCTTACCTGAAAGTATGGGT
GGAAGCGGTGACCCGTCACCGGTAACTGCATATGGTACGTACATGGGCATGAAAGCGGCGGCCAAAAAGGCGTTT
GGCTCTGATTCCCTGGCTGGCAAACGTATCGCTGTTCAAGGTGTGGGTCATGTTGGCACTTATCTGCTTGAGCAT
TTGACCAAAGAAGGTGCTCAGATTGTGCTGACTGACTACTATAAGGAACGTGCCGAGGAAGCAGGCGCGCGTTTT
GGCGCACAGGTTGTTGGCCTGGACGATATCTACGATCAAGAGGTCGACATTTACTCTCCATGTGCTCTCGGTGCT
ACCATCAACGATGACACTATCGATCGCCTGCGTTGCGCTGTTGTAGCCGGTTGCGCAAACAACCAGCTGAAAGAA
GAAAACGTCCACGGTCCGGCGCTGGTTGAGCGCGGGATAGTATACGCCCCAGACTTCCTGATCAATGCAGGTGGC
CTGATTAACGTGTATAGCGAAGTTACAGGGTCTACCCGTCAGGGGGCTTTAACTCAGACCGAAAAAATCTATGAC
TACACACTCCAAGTTCTGGAAAAAGCCGCGGCTGAAGGTCTGCACCCGCAGCAGGCTGCGATCCGTCAGGCGGAA
CAACGCATCGCTGCAATTGGTAAGGTGAAAAGCACCTAC (SEQ ID NO: 5)
MVEIQALPETSIFGQIADHQHEQVVFCHDHETGLRAIIGIHNTVLGPALGGTRMWHYATEAEALNDVLRLSRGMT
YKAAISGLNLGGGKAVIIGDAKTIKTEALLRKFGRFVQNLNGKYITAEDVNMTTKDMEYIRMETKHVAGLPESMG
GSGDPSPVTAYGTYMGMKAAAKKAFGSDSLAGKRIAVQGVGHVGTYLLEHLTKEGAQIVLTDYYKERAEEAGARF
GAQVVGLDDIYDQEVDIYSPCALGATINDDTIDRLRCAVVAGCANNQLKEENVHGPALVERGIVYAPDFLINAGG
LINVYSEVTGSTRQGALTQTEKIYDYTLQVLEKAAAEGLHPQQAAIRQAEQRIAAIGKVKSTY
(SEQ ID NO: 6)
LeuDH (Identifier: t160434; Accession: A0A1D2RXB2)
ATGATCTTCGAGACAATTTCTACGTCGAATCACGAAGAAGTTGTGTATTGCCATAACAAGGACGCCGGCTTGAAA
GCAATCATCGCGATTCACAACACTGTACTCGGTCCGGCTCTGGGTGGCACTCGCATGTGGCCCTACGCTAGCGAA
GAGGAAGCACTGAAAGATGTCCTTCGTTTATCCCGTGGGATGACCTACAAAGCTGCGGTTTCAGGTCTAAACCTG
GGCGGCGGTAAAGCTGTGATCTGGGGTGATCCGAATAAAGACAAGTCTGAAGCGCTGTTTAGAGCCTTCGGACGG
TTTGTAAACAGCCTGGGCGGACGCTACATTACCGCGGAGGACGTTGGCATTGATGTTAACGACATGGAATATGTG
CTGCGTGAAACTGATTACGTCACCGGTGTACATCAGGTTCACGGTGGGAGTGGTGATCCTTCTCCATTCACCGCA
TATGGCACTCTGCAAGGCCTGATGGCCGCTCTGCAAGTGAAATTCGGTAACGAAGACGTAGGCAATTACAGCTAC
GCTGTTCAGGGTGTGGGTCACGTTGGCATGGAATTTGTTAAACTGCTGCGTGAGCGCGGTGCAAAGGTTTTCGTC
ACTGACATCAACAAAGATGCGGTCCAGCGTGCTGTGGACGAATTTGGTTGTGAGGCAGTAGCCCTGGATGAAATC
TATGACGTTGATTGCGACGTGTACTCCCCGACCGCTCTGGGCGGCACCGTGAACGATAAAACTTTACCGCGTCTG
AAATGTAAGGTAATCTGCGGTGCGGCAAACAACCAGTTAGCTAATGATGAGATAGGCGTGGAACTGGAAAAAAAA
GGCATCCTCTATGCTCCGGACTACGCGGTCAACGCGGGTGGGCTGATGAACGTTAGCCTGGAAATCGATGGATAC
AACCGCGAACGTGCGATGCGTATGATGCGTACCATTTATTACAATTTGGGTCGCATTTTCGAAATCTCTAAGCGC
GACGGCATCCCTACATTCCGAGCCGCCGATCGTATGGCTGAAGAACGCATAACGGCCATCGGTAAACTGCGTTTA
CCGCATTTGGGCGCTGCGGCACCGCGCTTCCAGGGCCGACGTGGCAAC (SEQ ID NO: 7)
MIFETISTSNHEEVVYCHNKDAGLKAIIAIHNTVLGPALGGTRMWPYASEEEALKDVLRLSRGMTYKAAVSGLNL
GGGKAVIWGDPNKDKSEALFRAFGRFVNSLGGRYITAEDVGIDVNDMEYVLRETDYVTGVHQVHGGSGDPSPFTA
YGTLQGLMAALQVKFGNEDVGNYSYAVQGVGHVGMEFVKLLRERGAKVFVTDINKDAVQRAVDEFGCEAVALDEI
YDVDCDVYSPTALGGTVNDKTLPRLKCKVICGAANNQLANDEIGVELEKKGILYAPDYAVNAGGLMNVSLEIDGY
NRERAMRMMRTIYYNLGRIFEISKRDGIPTFRAADRMAEERITAIGKLRLPHLGAAAPRFQGRRGN
(SEQ ID NO: 8)
LeuDH (Identifier: t160048)
ATGCAGATCTTCGACACTTTGCAATCAATGGGCCATGAGCAGGTGGTCCTATGTAGCGATAAGACCACGGGTCTG
CGCGCCATTATCGCTATACACGATACATCCTTAGGGCCGGCGCTTGGTGGTACCCGTATGTGGCAGTATGCAACT
GACGACGATGCTATTACTGACGCACTCCGTCTGTCTCGGGGCATGACCTACAAAGCTGCGGTTTCTGGCGTAAAT
CTGGGCGGTGGTAAAGCCGTTATCATCGGAAACCCTCACAGTGATAAAAGCGAAGCGCTGTTTCGCGCTTACGGC
AGAATGGTGGAATCCCAGCGTGGGCGTTACATCACCGCCGAAGACGTTGGTACTAGCGTACGTGATATGGAGTGG
ATTCGCATGGAAACCAAATATGTAACGGGCGTGGGTGGCAACGGAGGCTCTGGTGACCCCTCTCCAGTTACCGCT
CTGGGTGTTTACTCGGGCATGAAGGCATGCGCTAAATCAGTCTATGGTACTGATGCGCTGAGCGGTAAAAGGATC
GTGGTTCAGGGCGCGGGTAACGTTGCATCCCATCTGGTTCACAGTCTGGTAAAAGAAGGCGCTGTGGTTTTCGTC
ACTGACATCTACGAAGAAAAGGCCAAAGCATTAGCGGCTGAAACGGGCGCTACCGTGATTCGCACCGACGAGGTT
TTTACTACACAATGCGATATCTTCTCTCCGAACGCTCTGGGGGCCGTCCTGAACGATGAAACTATTCCGCAGCTC
ACATGCGCTATCGTAGCTGGTGGTGCAAACAATCAGCTTAAAATCGAACAACGTCACGCCACGGCTCTGCAAGAG
AAAGGCATTCTGTATGCGCCGGATTACGTAATCAACGCCGGGGGCCTCATGAATGTGGCGAGCGAAGTTGACGGC
TACAACCGTGAAAAGGTTATGCGCCAGGCTGAAGGTATTTACGATATTACTATGAACATCCTAAATACCGCGCGT
GAGCGTAACATCCTGACCATCGAAGCATCCAACGCGATTGCTGAAGAGCGGATCAACAAAGTTCGCCATGTTCAC
GGGAACTTCATCGGTTCCCCGTCTATTCGCGGAGTA (SEQ ID NO: 9)
MQIFDTLQSMGHEQVVLCSDKTTGLRAIIAIHDTSLGPALGGTRMWQYATDDDAITDALRLSRGMTYKAAVSGVN
LGGGKAVIIGNPHSDKSEALFRAYGRMVESQRGRYITAEDVGTSVRDMEWIRMETKYVTGVGGNGGSGDPSPVTA
LGVYSGMKACAKSVYGTDALSGKRIVVQGAGNVASHLVHSLVKEGAVVFVTDIYEEKAKALAAETGATVIRTDEV
FTTQCDIFSPNALGAVLNDETIPQLTCAIVAGGANNQLKIEQRHATALQEKGILYAPDYVINAGGLMNVASEVDG
YNREKVMRQAEGIYDITMNILNTARERNILTIEASNAIAEERINKVRHVHGNFIGSPSIRGV
(SEQ ID NO: 10)
LeuDH (Identifier: tl60141; Accession: A0A0J1FEE3)
ATGACAACGTTCGAGTATATGGAAAAGTACGACTACGAACAACTGGTCCTTTGTCAGGATAACACTTCTGGCCTC
AAAGCAGTAATTTGCATCCATGACACCACTCTGGGGCCAGCTTTGGGTGGCACCCGTATGTGGAATTACGCCAGT
GAAGAAGATGCTATCCTGGATGCGTTACGCCTGGCGCGAGGTATGACTTATAAAAACGCTGCCGCAGGTCTGAAC
CTGGGCGGCGGTAAAGCTGTTATTATGGGCGACAGCCGTACCCAGAAATCAGAGGAACTGTTTCGCGCGTTCGGT
CGTTACGTGCAGGCGCTGAACGGCCGTTATATCACCGCTGAGGACGTTGGTACTAACGTACAAGATATGGACTGG
ATACACATGGAAACAAAGTTTGTGACCGGGATCTCCTCTTCGTACGGTGCTAGCGGAGATCCGTCCCCTCTGACC
GCACTGGGCGTTTACCGCGGTATGAAAGCCGCCGCAAAAGAAGCGTTCGGCAGCGACTCTTTAGAGGGTAAAACT
GTTGCTATTCAGGGTCTTGGCCACGTCGGCTATTACCTGGCAAAACACCTCACTGATGAAGGCGCTAAACTGATC
GTGACGGATATCAATTCTGAAGCCGTTAAGAGGGTAGCGCGTGAGTTCGTTGCTACCGCAGTCCGTACCGAAGAA
ATTTTCGGCGTTAAATGCGACATCTTTGCGCCCTGTGCTCTGGGTGCAGTTATCAACGATGAAACCATTCCGCAG
CTGAAGTGCCAGGTAGTTGCCGGTGCTGCGAACAATGTGTTGAAAGAGGATCGCCATGGTGACGAACTATACGAA
AAAGGAATCCTGTACGCTCCGGACTATGTAATTAACGCGGGCGGCGTTATCAACGTGGCCGACGAACTGGAAGGT
TACAACGCTGAACGTGCTCTGAAAAAAGTTGAGATGGTATATGATAATGTGGCACGCGTCATCGCTATTGCCAAG
CGTGACCATATCCCGACTTATAAAGCAGCGGACCGAATGGCTGAGGAACGTATTGCGAAAATTGGCAAAGTTTCC
AACACTTTCCTGCGC (SEQ ID NO: 11)
MTTFEYMEKYDYEQLVLCQDNTSGLKAVICIHDTTLGPALGGTRMWNYASEEDAILDALRLARGMTYKNAAAGLN
LGGGKAVIMGDSRTQKSEELFRAFGRYVQALNGRYITAEDVGTNVQDMDWIHMETKFVTGISSSYGASGDPSPLT
ALGVYRGMKAAAKEAFGSDSLEGKTVAIQGLGHVGYYLAKHLTDEGAKLIVTDINSEAVKRVAREFVATAVRTEE
IFGVKCDIFAPCALGAVINDETIPQLKCQVVAGAANNVLKEDRHGDELYEKGILYAPDYVINAGGVINVADELEG
YNAERALKKVEMVYDNVARVIAIAKRDHIPTYKAADRMAEERIAKIGKVSNTFLR (SEQ ID NO: 12)
KivD (Identifier: tl63988; Accession: A0A0L0P8D8)
ATGTCGGAGATCACATTGGGTAGATACCTTTTCGAACGCTTAAACCAACTGCAAGTGCAGACTATTTTTGGGCTG
CCCGGCGACTTCAATCTGTCCCTGCTGGATAAGATCTATGAAGTTGATGGCATGCGTTGGGCAGGTAACGCTAAC
GAACTCAACGCCGCTTACGCGGCTGACGGTTATAGCCGTGTCAAAGGCCTCGCATGTCTGGTTACCACTTTTGGT
GTAGGCGAGCTAAGTGCGCTGAATGGTGTGGGTGGCGCTTACGCAGAACACGTTGGGCTGCTGCATGTAGTGGGC
GTCCCATCAATCTCTAGCCAGGCGAAACAGCTGCTGCTGCACCATACCCTGGGTAACGGAGATTTCACGGTTTTC
CACCGCATGTCCAACAACATTTCTCAGACCACGGCTTTTATCAGCGACATTAATTCTGCTCCTGGTGAAATCGAT
AGGTGCATCCGTGAGGCCTGGGTACATCAGCGTCCGGTTTACGTCGGCCTGCCGGCGAACCTAGTTGACCTGACT
GTGCCGGCGTCTCTGTTAGACACTCCGATCGATCTGTCCTTGAAAAAAAACGACCCGGATGCCCAGGAAGAAGTT
ATTGAAACCGTCCTTGATCTGGTAGACAAGTCTAAAAACCCTATAATCTTAGTTGACGCATGCGCTAGCCGTCAC
TCATGCCGCGATGAAGTACGCCGGTTGGTGGACTCCACCAGCTTCCCGGTTTTCGTTACTCCAATGGGTAAATCT
GCTGTAAATGAGAGTCACCCGCGTTTTGGCGGTGTTTACGTGGGCAGCCTCAGCGAGCCAAACGTAAAAGAAGCC
GTTGAAAACGCTGACCTGGTGCTGTCCATAGGCGCCCTGTTGAGCGACTTCAACACTGGATCGTTCTCTTATTCC
TACAAAACTAAGAACATTGTTGAATTTCACTCTGATTATACCAAAATCCGTCAAGCAACGTTCCCGGGTGTTCAG
ATGAAAGAAGCACTGAATGTCCTGTTGGAAAAAATCCCGAGCCATGTCGCTAACTACAAACCTCTGCCGGTTCCG
CAGCGTCGCGTTATTCCGAGCCCAGGGGATAAGGCTGCGATCTCTCAGGAGTGGCTGTGGTCGCGTCTGTCTAGC
TGGTTCCGCGAGGGCGACATCGTCATTACAGAAACCGGTACCAGTGCGTTTGGAATTGTACAGTCCTATTTCCCA
GATAACTGCATCGGCATCAGTCAGGTGCTGTGGGGTTCGATCGGCTTCACCGTAGGTGCAACGCTGGGCGCGGTG
ATGGCTGCACAAGAAATCGATCCGAAAAAACGTGTGATTTTATTTGTCGGTGACGGTTCTCTGCAACTTACTGTA
CAGGAAATTTCTACCATGGTTAAGTGGGAAACCACTCCCTACCTGTTTGTGCTGAACAACGATGGGTACACTATC
GAACGCCTTATCCATGGCGAGACTGCTACGTATAACGATATTCAGCCGTGGGATAATCTGGGTCTGTTGCCGCTG
TTCAAAGCTCGTGACTACGAAACCAACCGAGTTGCGACTGTAGGCGAAATTGAAGCGCTATTCAACAATTCAGCT
TTCAATGAGAATACAAAGATCCGTATGGTGGAGGTCATGCTGCCGCGGATGGATGCACCACAGAACCTGGTTAAA
CAGGCTGAATTTTCCTCCAAGACCAACAGCGAAAAC(SEQ ID NO: 13)
MSEITLGRYLFERLNQLQVQTIFGLPGDFNLSLLDKIYEVDGMRWAGNANELNAAYAADGYSRVKGLACLVTTFG
VGELSALNGVGGAYAEHVGLLHVVGVPSISSQAKQLLLHHTLGNGDFTVFHRMSNNISQTTAFISDINSAPGEID
RCIREAWVHQRPVYVGLPANLVDLTVPASLLDTPIDLSLKKNDPDAQEEVIETVLDLVDKSKNPIILVDACASRH
SCRDEVRRLVDSTSFPVFVTPMGKSAVNESHPRFGGVYVGSLSEPNVKEAVENADLVLSIGALLSDFNTGSFSYS
YKTKNIVEFHSDYTKIRQATFPGVQMKEALNVLLEKIPSHVANYKPLPVPQRRVIPSPGDKAAISQEWLWSRLSS
WFREGDIVITETGTSAFGIVQSYFPDNCIGISQVLWGSIGFTVGATLGAVMAAQEIDPKKRVILFVGDGSLQLTV
QEISTMVKWETTPYLFVLNNDGYTIERLIHGETATYNDIQPWDNLGLLPLFKARDYETNRVATVGEIEALFNNSA
FNENTKIRMVEVMLPRMDAPQNLVKQAEFSSKTNSEN (SEQ ID NO: 14)
KivD (Identifier: tl64076; Accession: A0A0M5JJZ2)
ATGACAAGCATGGACAATTCTAGTCAGCAAATCCCCATGGGTCAGAAAACCGTCGGGGAGTACTTGTTCGATTGC
CTCAAGCAGGAAGGCATAACGGAAATCTTTGGTGTGCCGGGCGATTATAACTTCACCTTACTGGACGCCCTGCAA
GAATACAACGGTATTCGTTTCTATAACGGCCGCAACGAGCTGAATGCTGGCTACGCAGCTGACGGTTACGCGCGT
ATTAAAGGAATCTCCGCGCTAATCACTACTTTTGGTGTTGGTGAACTGTCAGCAACTAACGCTATTGCCGGCGCG
AACAGCGAACACGTACCTATCATCCATATTGTTGGGTCCCCACCGGAAAAAGCTCAGAAGGAGCGCAAACTGATG
CACCATACCCTGATGGATGGCAACTTCGACGTATTCCGTAAAGTTTACGAACCGCTTACCGCTTATACTACCATC
GTCACGGCAGATAACGCGCGGATGGAGATCCCGGCTGCTATCCGTATTGCCAAAGAACGAAGAAAGCCAGTGTAC
CTGGTTGTTGCGGATGACGTAGTGGCTAAACCGATTACTGGTCGTGAAGTCCCGGCATCTCCTCTGCCGGCTAGC
AATCAGGACAAACTGCTTGCTGCGGTTGAGCACGTTAGGCGTCTTCTGGAACCTGCACGCCAGCCGGTAATATTG
GTTGATGTGAAAGCCATGCGCTTTGGATTACAGACCGCCGTCAGGGAACTGGCAAACACTATGAATGTTCCAGTG
GCTACAATGATGTATGGCAAAGGCACTTTCGACGAAACCCATCCAAACTACATCGGCGTATATGCGGGTACGTTC
GGTTCGTCTGAAGTTCAATCTATCGTAGAAAACTCGGACTGTGTTATCGCCGTTGGTTTGGTGTGGAGCGATACT
AACACCGCAAACTTTACTGCGAAATTAAACCCGCACAATACCATTGAGGTTCAGCCGACAAAAGTGAAAATCGCT
GAGTCCCAGTACCCCGATGTCCGTGCCGCAGACATCCTGCAAGAAATGCAGAAGCTGGATTATCGTAGCCAGTCT
AAACCGGAAAAAATCTCATTTCCGTACGAAGAGATAACCGGGTCCAGTGATGAACCGCTCCGCGCAGAAAACTAC
TTCCCTCGTTTTCAGCGCATGCTGAAGGAAAACGATATTGTTATCGCTGAGACCGGCACGTTCTACTACGGTATG
AGTCAAGTTAAACTGCCCGCGAACACTACGTACATCATGCAGGGCGGCTGGCAGAGCATTGGTTATGCCACCCCG
GCGGCATACGGCGCGTCTATCGCTGCTCCGGACCGTCGCGTCTTACTGTTCACTGGTGATGGCTCCATGCAGCTG
ACCGCACAGGAAATCTCTTCTATGCTTTATTACGGTTGCAAGCCGATTATCTTTGTACTGAACAATGACGGGTAC
ACCATTGAGCGGTATCTGAATGTAGAAATCTCCCCTGACGAACAAAACTATAACGATATTCCGAACTGGTCTTAT
ACTAAACTGGCTGAGGCGTTCGGTGGTGAACTGTTCACTAAAACAGTGCGTACCAATGAAGAATTGGATGAAGCG
ATCACACAGGCTGAGCAAGAGTACGCCGAAAAACTGTGCCTGATCGAGATGATTGCTGCTGATCCAATGGACGCA
CCGGAATACATGCACCGTATCCGTAACCATAAGCAGGAACAGAAAAAG (SEQ ID NO: 15)
MTSMDNSSQQIPMGQKTVGEYLFDCLKQEGITEIFGVPGDYNFTLLDALQEYNGIRFYNGRNELNAGYAADGYAR
IKGISALITTFGVGELSATNAIAGANSEHVPIIHIVGSPPEKAQKERKLMHHTLMDGNFDVFRKVYEPLTAYTTI
VTADNARMEIPAAIRIAKERRKPVYLVVADDVVAKPITGREVPASPLPASNQDKLLAAVEHVRRLLEPARQPVIL
VDVKAMRFGLQTAVRELANTMNVPVATMMYGKGTFDETHPNYIGVYAGTFGSSEVQSIVENSDCVIAVGLVWSDT
NTANFTAKLNPHNTIEVQPTKVKIAESQYPDVRAADILQEMQKLDYRSQSKPEKISFPYEEITGSSDEPLRAENY
FPRFQRMLKENDIVIAETGTFYYGMSQVKLPANTTYIMQGGWQSIGYATPAAYGASIAAPDRRVLLFTGDGSMQL
TAQEISSMLYYGCKPIIFVLNNDGYTIERYLNVEISPDEQNYNDIPNWSYTKLAEAFGGELFTKTVRTNEELDEA
ITQAEQEYAEKLCLIEMIAADPMDAPEYMHRIRNHKQEQKK (SEQ ID NO: 16)
KivD (Identifier: tl63842; Accession: A0A0L7TB96)
ATGTCGACGACAACCGTTGGTGACTACTTGCTGTATCGCTTAAACGAAATCGGCATTGAGCACCTCTTCGGAGTG
CCAGGTGATTACAATCTGCAATTTCTGGATCATGTAATCGACCACCCTCAGCTGACTTGGGTCGGCTGCACTAAC
GAACTTAACGCTGCCTACGCAGCTGATGGTTATGCGCGTTGTCGTCCGGCTGCGGCACTGCTGACCACCTTCGGG
GTTGGCGAACTGAGCGCTATTAATGGCATCGCAGGTTCCTACGCGGAGTATCTGCCGGTAATACATATCGTTGGT
GCACCGAGTCTATCAGCCCAGCAGCAGGGCGACCTGATTCACCACTCTCTTGGCGAAGGTGATTTTTCCAGCTTC
CTGAGGATGTCCCAACCGGTGTCTGTTGCGCAGGCTGCTCTGACTCCTGATAACGCATGCAAGGAAATCGACCGC
GTACTGGCGGAAGTCCTCATTCAGCGTCGTCCCGGCTACCTGCTGCTGTCTACCGACGTGGCTGCTGCGCCGGCG
GCTCTGCCACAAAGCACTCTTTCTTTGCCGACCGCCCCGGATCATCGCGCAGTTCTGGCTGCTTTCAGCGACGCT
GCTGAGCAGATGCTGGCTCAGGCCAAAAGCGTCTCTCTACTGGCGGACTTTCTGGCTGATCGTTTCGGTGTTACT
CGAGCACTGGCCGCGTGGCTTCAGCAGGTTCCGCTACCGCACGCCACTCTGTTAATGGGTAAAGGCGTTCTGAGT
GAACAGCAACCAGGGTTCGTGGGTACCTACGCTGGTGCGGCATCTATCGATTCGACGCGTGGCGCAATCGAAGAA
GCTGGGGTAATTATCGGAGTGGGAGTTAGATTTTCCGACACTATCACAGCAGGCTTCTCGCAGCAGATCGACGCC
CGCCGTTTTATAGACATTCAACCCTTCTTCTCTCGTATTGGCGATCGCCAGTTTGATCACCTGCCGATGCAGGCT
GCCGTCGCAGCCCTGCATCAACTGTGTCTTCGTTATCAGCAGCAGTGGTCTATCACCGCTCCTAGCCCGCCTGCA
CTGCCGCCGGCTGCTGGTAGCGAGCTGTCCCAGAACGCATTCTGGCAGGCGATGCAGAACTTCATCCGCCCTGGG
GACCTGTTGGTGGCCGACCAAGGTACTGCGGCGTTCGGCGCAGCGGCGCTGCGCTTACCGCAGAATTGCCAGCTG
CTTGTGCAGCCGCTGTGGGGCTCAATCGGTTACAGTCTGCCGGCCACCTTTGGTGCTCAGACGGCAGATACAGAG
CGTCGTGTAATCCTAATCATTGGCGATGGTTCAGCGCAATTAACTATTCAGGAACTTTCCAGTATGATGCGTGAC
GGCTTGAAACCTATCATCTTTCTCCTGAACAACAACGGTTACACCGTTGAACGGGCGATTCACGGCGCGGAGCAA
CGTTATAACGATATCGCTGCTTGGAATTGGACCCAACTGCCCCAGGCGCTGAGTGTTCATTGCCCAGCGCAGAGC
TGGCGAGTCGTTGAAACGGTGCAGCTGACCGACGTAATGAAAGTCATCGCTGCTTCTCCGCGTCTGAGCTTGGTA
GAAGTTGTTCTGCCTGCAATGGATGTCCCACCGCTGCTGCAAGCAGTGAGTGCCGCTCTGAACCAGCGCAACTCC
TCT (SEQ ID NO: 17)
MSTTTVGDYLLYRLNEIGIEHLFGVPGDYNLQFLDHVIDHPQLTWVGCTNELNAAYAADGYARCRPAAALLTTFG
VGELSAINGIAGSYAEYLPVIHIVGAPSLSAQQQGDLIHHSLGEGDFSSFLRMSQPVSVAQAALTPDNACKEIDR
VLAEVLIQRRPGYLLLSTDVAAAPAALPQSTLSLPTAPDHRAVLAAFSDAAEQMLAQAKSVSLLADFLADRFGVT
RALAAWLQQVPLPHATLLMGKGVLSEQQPGFVGTYAGAASIDSTRGAIEEAGVIIGVGVRFSDTITAGFSQQIDA
RRFIDIQPFFSRIGDRQFDHLPMQAAVAALHQLCLRYQQQWSITAPSPPALPPAAGSELSQNAFWQAMQNFIRPG
DLLVADQGTAAFGAAALRLPQNCQLLVQPLWGSIGYSLPATFGAQTADTERRVILIIGDGSAQLTIQELSSMMRD
GLKPIIFLLNNNGYTVERAIHGAEQRYNDIAAWNWTQLPQALSVHCPAQSWRVVETVQLTDVMKVIAASPRLSLV
EVVLPAMDVPPLLQAVSAALNQRNSS (SEQ ID NO: 18)
Adh (Identifier: tl59319; Accession: A0A1E4TMA4)
ATGCAGACGGCGTTCTTGTATAAGCCAGGTCACGAAAACTTAGTGCGCTCGGAGATCCCGATACCTAAAGCTGGG
CGTGGCGAAGTCGTTCTGGAAATTAAAGCCGCTGGCATGTGCCATTCCGATCTGCACGTTCTCGACGGTGGAATC
CCCCTGCCGGGTCAATTTGTAATGGGCCATGAAATCGTTGGTACTATTCACGAGATCGGCCAGGACGTGACCGGT
TTCAAACAGGGCGATCTGTACGCAGTCCACGGCCCGAATCCGTGTGGTATTTGCACCCTGTGCAGAGAAGGATTT
GATAACGACTGCACTACAGTGGCGAAAACCGGTCAATGGTTCGGACTGGGTCTTGACGGCGGCTACCAGAAGTAT
ATCCGTATCCCGAACGTAAGGTCTATCGTTAAAGTTCCAGAAGGTGTTTCAGCTGAGGCAGCTGCGAGCTGTACT
GATGCAGTACTGACCCCGTACCGTGCACTAAAACAGGCTGGCGCCAGCAACTCTACTCGGGTACTGATTCTGGGT
CTGGGTGGCTTAGGTCTGAATGCCCTTAAACTGGCTAAGACCTTCGGCAGTTACGTTTACGCATCTGACCTGAAA
CCTTCTGCGCGTGAAGCTGCTAAGGCCGCTGGGGCGGATGAAGTGCTGGAGTCCCTGCCCGAAGACCCGCTGGGT
GTTGATATCGTGTTAGACGTCGTTGGCGTGCAGAGCACCTTCAACCTCGCTCAAAAACACGTTGGCCCGCGTGGC
ATCATTGTACCTGTAGGCCTGGCATCCCCACAGCTTTCGTTTAACCTAACGGATCTGGCGCTCCGCGAAATTCGT
GTTCAGGGCACTTTTTGGGGCACGAGCAATGAGCTGGCTGAATGTCTGCGCCTGTGCCAGCTGGGCCTGATCAAC
CCGAAATATACTGTGGTGCCTCTTGAAGAAGCGCCGAAATATATGGAAGCAATGGCTCATGGGAAAGTAGAAGGT
CGTATCGTTTTCCACCCG (SEQ ID NO: 19)
MQTAFLYKPGHENLVRSEIPIPKAGRGEVVLEIKAAGMCHSDLHVLDGGIPLPGQFVMGHEIVGTIHEIGQDVTG
FKQGDLYAVHGPNPCGICTLCREGFDNDCTTVAKTGQWFGLGLDGGYQKYIRIPNVRSIVKVPEGVSAEAAASCT
DAVLTPYRALKQAGASNSTRVLILGLGGLGLNALKLAKTFGSYVYASDLKPSAREAAKAAGADEVLESLPEDPLG
VDIVLDVVGVQSTFNLAQKHVGPRGIIVPVGLASPQLSFNLTDLALREIRVQGTFWGTSNELAECLRLCQLGLIN
PKYTVVPLEEAPKYMEAMAHGKVEGRIVFHP (SEQ ID NO: 20)
Adh (Identifier: tl59028; Accession: A0A192IDS9)
ATGCGCAGCATGCAGTTTGATGAGTACGGTGCACCCCTGAAAGCGTTCTCATATGAAGACCCGACCCCGCAAGGG
AAGGAAGTAGTCGTTAGGATCGAAGCCTGTGGTGTGTGCCACTCTGATATTCATCTTCACGAGGGCTACTTCGAC
ATGGGCGGTGGCAATAAAGCTGATGTTACTCGTGCTCGCGAACTCCCTTTTACATTGGGTCATGAAATCGTTGGC
GAAGTGGTAGCAACTGGACCAGGTGTCACCGGCGCTAAACCGGGCGACAAACGTATTGTGTACCCGTGGATCGGG
TGCGGCGACTGCCCGAAATGCAACAGTGGTGAGGATCAGTCCTGTGCGCGTCCACGTAACCTGGGTGTTCACGTT
GACGGTGGCTATTCGACGCACGTAAAGATACCGGACGAAAAATTCCTGTTCGCCTACGATGGTATTCCTACTGAG
TTAGCGGGAACCTATGCTTGCAGCGGCATCACCGCTTATGGTGCACTGATGAAAGCAAAGGAAGCGGCTGAAAGA
TCTGGCTACATCGGTCTGATTGGCGCTGGTGGCGTTGGCATGGCTGGTCTGATGCTGGCCAAAGCAGCGATCGGG
GCTAAAACTGTAGTCTTTGATATCGACGACGCAAAACTGGAAGCTGCGACCCGTGCCGGGGCGGATTACGTGTTC
AACTCCGGTGCAAAAGAAACACGCAAGGAAGTTATGAAACTAACGAATGGTGGCCTGTCTGGTGCTGTTGATTTC
GTTGGCAGCGATAAAAGCGCTCTGTTTGGAATCAACGCCTTGGGTCAGAACGGCGTGCTGGTCATAATTGGACTG
TTCGGTGGCGCTATGACTGTTCCGGTACCCCTGTTCCCGCTGAAAGGGATCACCGTACGTGGCTCATACGTAGGT
TCCCTGCAAGAGATGAGTGATATGATGGAGTTAGTTCGCGCTGGGAAAGTTCCTCCGATGCCGGTAAAAACTCGG
CCACTGGACGCTGCCTGGGAAACCCTTGAGGATCTACGCCATGGTAAAATCGTGGGCCGTGTTGTTCTGACCCCA
(SEQ ID NO: 21)
MRSMQFDEYGAPLKAFSYEDPTPQGKEVVVRIEACGVCHSDIHLHEGYFDMGGGNKADVTRARELPFTLGHEIVG
EVVATGPGVTGAKPGDKRIVYPWIGCGDCPKCNSGEDQSCARPRNLGVHVDGGYSTHVKIPDEKFLFAYDGIPTE
LAGTYACSGITAYGALMKAKEAAERSGYIGLIGAGGVGMAGLMLAKAAIGAKTVVFDIDDAKLEAATRAGADYVF
NSGAKETRKEVMKLTNGGLSGAVDFVGSDKSALFGINALGQNGVLVIIGLFGGAMTVPVPLFPLKGITVRGSYVG
SLQEMSDMMELVRAGKVPPMPVKTRPLDAAWETLEDLRHGKIVGRVVLTP (SEQ ID NO: 22)
Adh (Identifier: tl58538; Accession: A0A0P1J1W4)
ATGACAGCGGAGCAGCAAAATGGGGTATCCGACTCACGCCGTTTCGAATTTCAGGAATTTGGTGGCCCTATCGCC
CCACAGACCTATCAGCTCCCCGCACCGGCTAGCGATGAAGTTTTGTTAAAGGTGAACTACTGCGGTGTCTGTCAC
AGTGATGTTCATCTTCACGACGGCTACTTCGAGCTGGGTGGCGATAAACGTCTGAACTTCGCTATGCCGCTGCCG
CTGACGCTGGGTCACGAAGTAATTGGCACCGTTGTGGCTGTCGGCGACCAGGTTACTGGTGTAAAACCGGGGGAC
CAGCGACTGATCTATCCGTGGATAGGTTGCGGAAAATGCGGCGCGTGTCAAAAAGGAGAAGAAAACCTGTGCGTT
ACTCCTGCACATCTGGGCGTGAACAAGCCGGGCGGTTACGCTGATCACATCGTTGTACCCCATTCTCGCTACCTT
CTGGACATTTCGGGTCTGAACCCGGGTGATGCCGCTACCCTCGCGTGCTCCGGCCTGACCACTTTCAGCGCGATC
AACAAAGTGTTGCCGCTTGCAGATGACCAGTGGATTGTTGTTATCGGTTGTGGTGGCCTCGGCCAGATGGCGCTG
CGTATCCTGCAAGCTATGGGAATTGGCAATGTTATCGGTATTGACCTGTCTGAAGAGAAACGGAAACTGGCTCAT
GAAAGCGGTGCACGTCACTCCTTCGATCCAAACACTCCGAAGCTGAACCGCGTGGTCGCCGAAACCTGCCCGGGT
ACGGTACAGGCCGCGTTAGACTTTGTGGGCAATGAGCAAACTGCTCAGCTGGCACTGTCTCTGCTTGGAAAAGGT
GGCAAATATGTTCCTGTCGGGCTGCACGGCGGCGAGCTGCGTTACCCATTGCCGATCATCACGAACAAAGCTGTA
AGTATCATCGGTTCTTACGTTGGTACCCTGAAAGAACTGGAAGACTTAGTTGCTTTCGCCAAGGAAAAAAATCTG
CCGCCAATTCATATTGAACACCGCCCGCTGGAATCGGCGGCTCAGGCCGTAGAGGACCTGGAAAAAGGACAGGTT
GCTGGGCGTGTTATCCTGGATGCAGGTAAC(SEQ ID NO: 23)
MTAEQQNGVSDSRRFEFQEFGGPIAPQTYQLPAPASDEVLLKVNYCGVCHSDVHLHDGYFELGGDKRLNFAMPLP
LTLGHEVIGTVVAVGDQVTGVKPGDQRLIYPWIGCGKCGACQKGEENLCVTPAHLGVNKPGGYADHIVVPHSRYL
LDISGLNPGDAATLACSGLTTFSAINKVLPLADDQWIVVIGCGGLGQMALRILQAMGIGNVIGIDLSEEKRKLAH
ESGARHSFDPNTPKLNRVVAETCPGTVQAALDFVGNEQTAQLALSLLGKGGKYVPVGLHGGELRYPLPIITNKAV
SIIGSYVGTLKELEDLVAFAKEKNLPPIHIEHRPLESAAQAVEDLEKGQVAGRVILDAGN
(SEQ ID NO: 24)
GFP (Negative Control)
ATGACCGCACTTACGGAAGGGGCAAAACTGTTTGAGAAAGAGATACCGTATATAACCGAACTGGAAGGCGACGTA
GAAGGGATGAAATTTATAATTAAAGGCGAGGGGACCGGGGACGCGACCACGGGGACCATTAAAGCGAAATACATA
TGCACTACGGGCGACCTGCCGGTACCGTGGGCAACCCTGGTGAGCACCCTGAGCTACGGGGTCCAGTGTTTCGCC
AAGTACCCGAGCCACATAAAGGATTTCTTTAAGAGCGCCATGCCGGAAGGGTATACCCAAGAGCGTACCATAAGC
TTCGAAGGCGACGGCGTGTACAAGACGCGTGCTATGGTCACCTACGAACGCGGGTCTATATACAATCGTGTAACG
CTGACTGGGGAGAACTTTAAGAAAGACGGGCACATTCTGCGTAAGAACGTCGCATTCCAATGCCCGCCAAGCATT
CTGTATATTCTGCCTGACACCGTCAACAATGGCATACGCGTCGAGTTCAACCAGGCGTACGATATTGAAGGGGTG
ACCGAAAAACTGGTCACCAAATGCAGCCAAATGAATCGTCCGCTTGCGGGCAGTGCGGCAGTGCATATACCGCGT
TATCATCACATTACCTACCACACCAAACTGAGCAAAGACCGCGACGAGCGCCGTGATCACATGTGTCTGGTTGAG
GTAGTGAAAGCGGTCGATCTGGACACGTATCAGTGA (SEQ ID NO: 25)
MTALTEGAKLFEKEIPYITELEGDVEGMKFIIKGEGTGDATTGTIKAKYICTTGDLPVPWATLVSTLSYGVQCFA
KYPSHIKDFFKSAMPEGYTQERTISFEGDGVYKTRAMVTYERGSIYNRVTLTGENFKKDGHILRKNVAFQCPPSI
LYILPDTVNNGIRVEFNQAYDIEGVTEKLVTKCSQMNRPLAGSAAVHIPRYHHITYHTKLSKDRDERRDHMCLVE
WKAVDLDTYQ (SEQ ID NO: 26)

TABLE 4
Enzyme Screening Data
LeuDH enzymes and activity relative to control

| | | | Fold- | | |
|---|---|---|---|---|---|
| | | | Improvement | | |
| | Protein | | relative to | Nucleotide | Protein |
| Accession | Mutations | Strain | control | SEQ ID NO | SEQ ID NO |
| P0A392 | wt | Control | 0 | 37 | 257 |
| A0A1T4PGG9 | wt | t160946 | 2.846 | 38 | 258 |
| A4CBM3 | wt | t161014 | 2.188 | 39 | 259 |
| A0A0C1US13 | wt | t160854 | 2.178 | 40 | 260 |
| A0A1M6BE59 | wt | t160389 | 2.166 | 41 | 261 |
| K2M7H0 | wt | t160943 | 2.027 | 42 | 262 |
| A0A1Q6ZIF7 | wt | t160092 | 2.005 | 43 | 263 |
| A0A075JPW8 | wt | t160267 | 2.002 | 44 | 264 |
| A0A0B5AS65 | wt | t160288 | 1.910 | 45 | 265 |
| A0A0V8JFL2 | wt | t160337 | 1.826 | 46 | 266 |
| A0A1S2LUY1 | wt | t160524 | 1.804 | 47 | 267 |
| A0A0A8UN70 | wt | t161111 | 1.792 | 48 | 268 |
| P0A392 | G43T | t159984 | 1.775 | 49 | 269 |
| A0A1E7PTP0 | wt | t161162 | 1.751 | 50 | 270 |
| A0A1S9B636 | wt | t160283 | 1.741 | 51 | 271 |
| P0A392 | E116V | t160562 | 1.553 | 52 | 272 |
| A0A1D2RXB2 | wt | t160434 | 1.550 | 53 | 273 |
| K4KRS4 | wt | t160706 | 1.548 | 54 | 274 |
| P0A392 | L76F | t160502 | 1.538 | 55 | 275 |
| P0A392 | T136R | t160559 | 1.521 | 56 | 276 |
| P0A392 | A297C | t160202 | 1.509 | 57 | 277 |
| A0A1I1NGX1 | wt | t160947 | 1.501 | 58 | 278 |
| A0A142ITE6 | wt | t161198 | 1.401 | 59 | 279 |
| I1DTY5 | wt | t160169 | 1.364 | 60 | 280 |
| P0A392 | A297Y | t160199 | 1.364 | 61 | 281 |
| A0A0A0EMP0 | wt | t160499 | 1.359 | 62 | 282 |
| W4PY11 | wt | t160682 | 1.359 | 63 | 283 |
| R8B531 | wt | t161210 | 1.359 | 64 | 284 |
| A0A1Q2KY34 | wt | t160573 | 1.340 | 65 | 285 |
| L1QQC1 | wt | t161091 | 1.333 | 66 | 286 |
| D6XVM2 | wt | t160162 | 1.301 | 67 | 287 |
| P0A392 | L78V | t160587 | 1.281 | 68 | 288 |
| A0A1G8KLY7 | wt | t160351 | 1.267 | 69 | 289 |
| A0A0J6CNT2 | wt | t160438 | 1.254 | 70 | 290 |
| P0A392 | L300K | t160181 | 1.196 | 71 | 291 |
| U3HCY1 | wt | t161117 | 1.191 | 72 | 292 |
| A0A1K1TVW4 | wt | t160461 | 1.188 | 73 | 293 |
| A0A1Y6CWJ6 | wt | t160154 | 1.186 | 74 | 294 |
| A0A154W9T2 | wt | t160973 | 1.171 | 75 | 295 |
| I1D544 | wt | t161185 | 1.149 | 76 | 296 |
| A0A165NUD8 | wt | t161204 | 1.149 | 77 | 297 |
| A0A0A8JN83 | wt | t160338 | 1.144 | 78 | 298 |
| P0A392 | N71T | t160401 | 1.144 | 79 | 299 |
| F7RX04 | wt | t160786 | 1.110 | 80 | 300 |
| A0A1U9K9A9 | wt | t160671 | 1.108 | 81 | 301 |
| A0A0K6GVS2 | wt | t160957 | 1.105 | 82 | 302 |
| A0A136MKS4 | wt | t160417 | 1.095 | 83 | 303 |
| A0A0A5GIG6 | wt | t160609 | 1.076 | 84 | 304 |
| A0A143BJV1 | wt | t160627 | 1.051 | 85 | 305 |
| K6YKY7 | wt | t161088 | 1.046 | 86 | 306 |
| A0A0T5PG63 | wt | t160158 | 1.032 | 87 | 307 |
| A0A1M6L5E8 | wt | t160479 | 1.032 | 88 | 308 |
| P0A392 | L42Q | t160013 | 1.029 | 89 | 309 |
| A0A0A2TA47 | wt | t160286 | 1.017 | 90 | 310 |
| P0A392 | A297H | t160636 | 1.012 | 91 | 311 |
| A0A0Q5UT14 | wt | t160279 | 1.002 | 92 | 312 |
| I4D8U4 | wt | t160598 | 1.000 | 93 | 313 |
| P0A392 | I113V | t160129 | 0.993 | 94 | 314 |
| A0A1G3WLY4 | wt | t159999 | 0.976 | 95 | 315 |
| P0A392 | A297N | t160134 | 0.968 | 96 | 316 |
| P0A392 | A297M | t160503 | 0.954 | 97 | 317 |
| A0A1X4MV49 | wt | t160926 | 0.949 | 98 | 318 |
| P0A392 | A297L | t160497 | 0.912 | 99 | 319 |
| A0A0J1FEE3 | wt | t160141 | 0.897 | 100 | 320 |
| P0A392 | E116A | t160512 | 0.892 | 101 | 321 |
| P0A392 | M67T | t160125 | 0.883 | 102 | 322 |
| A0A0F7HKR2 | wt | t160291 | 0.873 | 103 | 323 |
| K0AAV5 | wt | t160552 | 0.870 | 104 | 324 |
| A0A1Q4XJW1 | wt | t160891 | 0.868 | 105 | 325 |
| P0A392 | L300N | t160557 | 0.866 | 106 | 326 |
| A0A0K9GVT6 | wt | t160443 | 0.863 | 107 | 327 |
| W7D8C3 | wt | t160771 | 0.858 | 108 | 328 |
| F7NG13 | wt | t160215 | 0.851 | 109 | 329 |
| A0A1H8Q403 | wt | t160870 | 0.836 | 110 | 330 |
| P0A392 | L42T | t160357 | 0.829 | 111 | 331 |
| E1WZZ8 | wt | t160664 | 0.797 | 112 | 332 |
| A0A0K9GC14 | wt | t160444 | 0.790 | 113 | 333 |
| P0A392 | V296N | t160184 | 0.787 | 114 | 334 |
| A0A1F3SFY8 | wt | t160002 | 0.785 | 115 | 335 |
| P0A392 | L78K | t160487 | 0.782 | 116 | 336 |
| P0A392 | T136S | t160176 | 0.768 | 117 | 337 |
| A0A1Y5EK08 | wt | t160841 | 0.768 | 118 | 338 |
| P0A392 | T136F | t160489 | 0.763 | 119 | 339 |
| N0AUJ4 | wt | t160823 | 0.751 | 120 | 340 |
| P0A392 | M67Q | t159980 | 0.748 | 121 | 341 |
| C4L3E4 | wt | t160256 | 0.748 | 122 | 342 |
| A0A1I6TTT1 | wt | t160115 | 0.733 | 123 | 343 |
| P0A392 | A297R | t160509 | 0.733 | 124 | 344 |
| A0A1H7JVK8 | wt | t160952 | 0.733 | 125 | 345 |
| A0A1U7M8J0 | wt | t160255 | 0.724 | 126 | 346 |
| P0A392 | L300Q | t160226 | 0.721 | 127 | 347 |
| A1S7B6 | wt | t160188 | 0.719 | 128 | 348 |
| P0A392 | V293S | t160602 | 0.711 | 129 | 349 |
| C1A7X5 | wt | t160733 | 0.709 | 130 | 350 |
| A0A0W0TJD2 | wt | t161212 | 0.697 | 131 | 351 |
| P0A392 | I113F | t160504 | 0.689 | 132 | 352 |
| P0A392 | M67E | t160064 | 0.685 | 133 | 353 |
| A0A1U7JH14 | wt | t160966 | 0.685 | 134 | 354 |
| P0A392 | L300A | t160612 | 0.680 | 135 | 355 |
| P0A392 | E116S | t160543 | 0.675 | 136 | 356 |
| P0A392 | G43F | t160059 | 0.672 | 137 | 357 |
| P0A392 | A297F | t160588 | 0.670 | 138 | 358 |
| M8DS05 | wt | t160310 | 0.663 | 139 | 359 |
| P0A392 | L300C | t160633 | 0.658 | 140 | 360 |
| P0A392 | L300F | t160128 | 0.655 | 141 | 361 |
| M7N8L2 | wt | t160152 | 0.655 | 142 | 362 |
| P0A392 | L78F | t160584 | 0.653 | 143 | 363 |
| G8R2S3 | wt | t160212 | 0.650 | 144 | 364 |
| A0A0P8B102 | wt | t161073 | 0.650 | 145 | 365 |
| S2YPJ0 | wt | t160830 | 0.643 | 146 | 366 |
| A0A1M5CX03 | wt | t159964 | 0.636 | 147 | 367 |
| P0A392 | L76E | t160245 | 0.626 | 148 | 368 |
| A0A1M5IEB6 | wt | t160988 | 0.626 | 149 | 369 |
| A0A0F6SHW7 | wt | t160860 | 0.619 | 150 | 370 |
| A0A0U3AUS4 | wt | t160964 | 0.619 | 151 | 371 |
| A0A081G3H3 | wt | t160968 | 0.604 | 152 | 372 |
| A0A1Q4UNH5 | wt | t161006 | 0.599 | 153 | 373 |
| P0A392 | A297D | t160548 | 0.597 | 154 | 374 |
| P0A392 | V293Q | t160249 | 0.594 | 155 | 375 |
| P0A392 | T136E | t160648 | 0.594 | 156 | 376 |
| P0A392 | L300D | t160248 | 0.587 | 157 | 377 |
| P0A392 | L300T | t160270 | 0.587 | 158 | 378 |
| P0A392 | L76H | t160546 | 0.587 | 159 | 379 |
| P0A392 | L76W | t160139 | 0.579 | 160 | 380 |
| P0A392 | L76M | t160274 | 0.575 | 161 | 381 |
| P0A392 | L300M | t160541 | 0.548 | 162 | 382 |
| T0CG61 | wt | t160808 | 0.538 | 163 | 383 |
| A0A166W971 | wt | t160538 | 0.535 | 164 | 384 |
| P0A392 | V296C | t160206 | 0.533 | 165 | 385 |
| P0A392 | A297E | t160567 | 0.533 | 166 | 386 |
| K2JU58 | wt | t160877 | 0.523 | 167 | 387 |
| P0A392 | G44I | t160011 | 0.516 | 168 | 388 |
| A0A0M4FMC6 | wt | t160371 | 0.516 | 169 | 389 |
| P0A392 | M67S | t160060 | 0.509 | 170 | 390 |
| A0A0K1JA83 | wt | t160995 | 0.509 | 171 | 391 |
| P0A392 | A115T | t159988 | 0.504 | 172 | 392 |
| A0A1N6U8W9 | wt | t160814 | 0.504 | 173 | 393 |
| A0A075LQK1 | wt | t160493 | 0.499 | 174 | 394 |
| P0A392 | G44Y | t160080 | 0.494 | 175 | 395 |
| P0A392 | L300H | t160197 | 0.494 | 176 | 396 |
| A0A0K8QRE8 | wt | t160626 | 0.489 | 177 | 397 |
| A0A1M6M3I5 | wt | t160012 | 0.487 | 178 | 398 |
| A0A0F7JZ22 | wt | t161016 | 0.477 | 179 | 399 |
| P0A392 | L78H | t160634 | 0.469 | 180 | 400 |
| A0A1Y6BX33 | wt | t160700 | 0.460 | 181 | 401 |
| P0A392 | V296L | t160146 | 0.447 | 182 | 402 |
| A0A1L8CTI5 | wt | t161020 | 0.445 | 183 | 403 |
| P0A392 | L300Y | t160145 | 0.443 | 184 | 404 |
| P0A392 | E116N | t160539 | 0.428 | 185 | 405 |
| A0A171DN74 | wt | t160716 | 0.423 | 186 | 406 |
| P0A392 | A297K | t160491 | 0.416 | 187 | 407 |
| P0A392 | L78Y | t160594 | 0.416 | 188 | 408 |
| E6TXR8 | wt | t160618 | 0.416 | 189 | 409 |
| P0A392 | N71H | t160120 | 0.411 | 190 | 410 |
| A0A1G3X1T7 | wt | t160910 | 0.411 | 191 | 411 |
| P0A392 | E116W | t160246 | 0.408 | 192 | 412 |
| U4KND6 | wt | t160852 | 0.408 | 193 | 413 |
| P0A392 | E116R | t160131 | 0.399 | 194 | 414 |
| P0A392 | N71C | t160385 | 0.399 | 195 | 415 |
| A0A1G0BBA9 | wt | t160899 | 0.396 | 196 | 416 |
| A0A1Y2L717 | wt | t160990 | 0.396 | 197 | 417 |
| P0A392 | A297T | t160227 | 0.389 | 198 | 418 |
| A0A0M4UKZ2 | wt | t160340 | 0.379 | 199 | 419 |
| P0A392 | A297W | t160596 | 0.357 | 200 | 420 |
| P0A392 | L78C | t160406 | 0.350 | 201 | 421 |
| E2SC01 | wt | t161059 | 0.350 | 202 | 422 |
| A0A1K1PP57 | wt | t160629 | 0.347 | 203 | 423 |
| P0A392 | G44K | t159990 | 0.345 | 204 | 424 |
| P0A392 | A115S | t160495 | 0.342 | 205 | 425 |
| P0A392 | L300S | t160275 | 0.337 | 206 | 426 |
| P0A392 | L300W | t160639 | 0.337 | 207 | 427 |
| A0A1G0A9I7 | wt | t160875 | 0.337 | 208 | 428 |
| A0A0W7WYJ8 | wt | t161047 | 0.337 | 209 | 429 |
| P0A392 | V296E | t160520 | 0.325 | 210 | 430 |
| P0A392 | T136Y | t160638 | 0.325 | 211 | 431 |
| P0A392 | A115V | t160123 | 0.320 | 212 | 432 |
| A0A1V0ADI4 | wt | t160970 | 0.318 | 213 | 433 |
| W7ZGF1 | wt | t160812 | 0.315 | 214 | 434 |
| P0A392 | A115Q | t159982 | 0.311 | 215 | 435 |
| A0A1H6CJX7 | wt | t161141 | 0.308 | 216 | 436 |
| P0A392 | M67K | t160356 | 0.296 | 217 | 437 |
| P0A392 | L78Q | t160581 | 0.296 | 218 | 438 |
| P0A392 | T136L | t160589 | 0.293 | 219 | 439 |
| P0A392 | E116L | t160604 | 0.293 | 220 | 440 |
| P0A392 | I113M | t160628 | 0.291 | 221 | 441 |
| P0A392 | L76Y | t160516 | 0.289 | 222 | 442 |
| P0A392 | V293A | t160655 | 0.274 | 223 | 443 |
| P0A392 | V296K | t160243 | 0.267 | 224 | 444 |
| P0A392 | L76R | t160153 | 0.264 | 225 | 445 |
| P54531 | wt | t160721 | 0.262 | 226 | 446 |
| P0A392 | V296I | t160271 | 0.259 | 227 | 447 |
| P0A392 | L300R | t160560 | 0.254 | 228 | 448 |
| K9ARW8 | wt | t160789 | 0.252 | 229 | 449 |
| P0A392 | L76S | t160133 | 0.249 | 230 | 450 |
| P0A392 | I113W | t160094 | 0.244 | 231 | 451 |
| P0A392 | A115N | t160194 | 0.240 | 232 | 452 |
| P0A392 | V296S | t160644 | 0.240 | 233 | 453 |
| P0A392 | E116M | t160643 | 0.235 | 234 | 454 |
| P0A392 | L42A | t160402 | 0.232 | 235 | 455 |
| P0A392 | V293C | t160500 | 0.225 | 236 | 456 |
| P0A392 | N71M | t160324 | 0.220 | 237 | 457 |
| P0A392 | V296A | t160143 | 0.213 | 238 | 458 |
| P0A392 | G43W | t160099 | 0.210 | 239 | 459 |
| P0A392 | A297Q | t160140 | 0.196 | 240 | 460 |
| P0A392 | V293T | t160221 | 0.191 | 241 | 461 |
| P0A392 | I113Y | t160098 | 0.188 | 242 | 462 |
| P0A392 | L76I | t160601 | 0.188 | 243 | 463 |
| P0A392 | G44H | t160029 | 0.176 | 244 | 464 |
| P0A392 | L76K | t160585 | 0.171 | 245 | 465 |
| P0A392 | G43Y | t159996 | 0.169 | 246 | 466 |
| P0A392 | N71D | t160415 | 0.142 | 247 | 467 |
| P0A392 | I113Q | t160632 | 0.139 | 248 | 468 |
| P0A392 | M67A | t160055 | 0.127 | 249 | 469 |
| P0A392 | V296T | t160630 | 0.122 | 250 | 470 |
| P0A392 | L76T | t160603 | 0.115 | 251 | 471 |
| A0A1Q4VRJ4 | wt | t161033 | 0.112 | 252 | 472 |
| B2A513 | wt | t160167 | 0.108 | 253 | 473 |
| P0A392 | G43E | t160096 | 0.083 | 254 | 474 |
| P0A392 | N71K | t160101 | 0.044 | 255 | 475 |

TABLE 5
KivD enzymes and activity relative to control

| | | Fold- | | |
|---|---|---|---|---|
| | | Improvement | | |
| | | compared to | Nucleotide | Protein |
| Accession | Label | control | SEQ ID NO: | SEQ ID NO |
| Q684J7 | Control | 0 | 477 | 533 |
| A0A085UD38 | t163850 | 1.958 | 478 | 534 |
| A0A090DYV6 | t163542 | 3.986 | 479 | 535 |
| A0A0A6W4H3 | t163732 | 4.354 | 480 | 536 |
| A0A0B1U4F6 | t163805 | 2.972 | 481 | 537 |
| A0A0D0SDJ9 | t163730 | 3.292 | 482 | 538 |
| A0A0D2CSK3 | t163274 | 3.965 | 483 | 539 |
| A0A0D2GWW0 | t163016 | 4.354 | 484 | 540 |
| A0A0H4KFT8 | t163716 | 3.958 | 485 | 541 |
| A0A0J8UR79 | t163869 | 2.250 | 486 | 542 |
| A0A0K2Y209 | t163916 | 3.944 | 487 | 543 |
| A0A0L0P8D8 | t163988 | 5.097 | 488 | 544 |
| A0A0L7TB96 | t163842 | 4.833 | 489 | 545 |
| A0A0M5JJZ2 | t164076 | 4.944 | 490 | 546 |
| A0A0M5MY84 | t163914 | 4.139 | 491 | 547 |
| A0A0Q4N500 | t164007 | 4.493 | 492 | 548 |
| A0A0T9T7Y7 | t163705 | 3.694 | 493 | 549 |
| A0A0T9UPI9 | t163338 | 3.493 | 494 | 550 |
| A0A0U1CW59 | t163964 | 3.201 | 495 | 551 |
| A0A0U2NS09 | t163656 | 2.222 | 496 | 552 |
| A0A198FEB4 | t163871 | 4.382 | 497 | 553 |
| A0A1B1NY37 | t163888 | 3.646 | 498 | 554 |
| A0A1B7ILY5 | t163742 | 3.792 | 499 | 555 |
| A0A1B9AUW4 | t162995 | 3.889 | 500 | 556 |
| A0A1D4X3F2 | t163818 | 4.708 | 501 | 557 |
| A0A1F2KK66 | t163546 | 3.403 | 502 | 558 |
| A0A1G7WAJ7 | t163085 | 5.076 | 503 | 559 |
| A0A1M7EHD4 | t163474 | 1.813 | 504 | 560 |
| A0A1Q4T3V5 | t163704 | 4.535 | 505 | 561 |
| A0A1T1GFV6 | t163784 | 3.500 | 506 | 562 |
| A0A1U4TJK1 | t163702 | 4.722 | 507 | 563 |
| A0A1V2L8B3 | t164100 | 3.229 | 508 | 564 |
| A0A1V2YXQ3 | t163766 | 2.319 | 509 | 565 |
| A0A1V4SV36 | t163852 | 4.396 | 510 | 566 |
| A0A1V6TQU7 | t162902 | 3.118 | 511 | 567 |
| A0A1W6B724 | t163806 | 3.639 | 512 | 568 |
| A0A1X0AE10 | t163798 | 3.104 | 513 | 569 |
| A0A1X1XPA7 | t163472 | 3.826 | 514 | 570 |
| A0A1X2FKJ1 | t163432 | 3.035 | 515 | 571 |
| A0A1Y6E4E9 | t163406 | 3.486 | 516 | 572 |
| A0A205J7X5 | t163837 | 3.910 | 517 | 573 |
| A0A2B1L7A1 | t163722 | 4.215 | 518 | 574 |
| B9DJU8 | t163844 | 4.597 | 519 | 575 |
| D4B725 | t163868 | 4.111 | 520 | 576 |
| D4C3A5 | t163661 | 2.139 | 521 | 577 |
| D4F0I3 | t163478 | 0.896 | 522 | 578 |
| D7UWC4 | t163880 | 3.785 | 523 | 579 |
| F5SQV4 | t163740 | 2.535 | 524 | 580 |
| G9YCD8 | t163678 | 0.090 | 525 | 581 |
| I1CGS4 | t163934 | 3.785 | 526 | 582 |
| J2LV57 | t163902 | 2.667 | 527 | 583 |
| Q6C9L5 | t163155 | 4.222 | 528 | 584 |
| R5SST3 | t163337 | 3.014 | 529 | 585 |
| R8AV71 | t163285 | 4.535 | 530 | 586 |
| S3IST7 | t163983 | 2.979 | 531 | 587 |
| W0L941 | t163973 | 3.396 | 532 | 588 |

TABLE 6
Adh enzymes and activity relative to control

| | | Fold- | Nucleotide | Protein |
|---|---|---|---|---|
| | | Improvement | Sequence | Sequence |
| Accession | Label | relative to control | SEQ ID NO | SEQ ID NO |
| P00331 | Control | 0 | 589 | 645 |
| A0A011RFM0 | t159061 | −0.581 | 590 | 646 |
| A0A068NM64 | t159163 | 4.815 | 591 | 647 |
| A0A081B9F7 | t159282 | 5.992 | 592 | 648 |
| A0A0F7S860 | t159174 | −0.411 | 593 | 649 |
| A0A0F8XA97 | t159080 | −0.250 | 594 | 650 |
| A0A0L8BIH2 | t158526 | 0.629 | 595 | 651 |
| A0A0M2SIC1 | t158995 | 0.323 | 596 | 652 |
| A0A0M8TKC3 | t158267 | 2.427 | 597 | 653 |
| A0A0N1F703 | t159004 | 9.032 | 598 | 654 |
| A0A0P1J1W4 | t158538 | 10.516 | 599 | 655 |
| A0A0Q6FH05 | t159022 | −0.113 | 600 | 656 |
| A0A0Q9AMT3 | t158946 | 1.476 | 601 | 657 |
| A0A163KUH6 | t159154 | 0.710 | 602 | 658 |
| A0A192IDS9 | t159028 | 10.581 | 603 | 659 |
| A0A1A0K0C6 | t159162 | 0.645 | 604 | 660 |
| A0A1E4TMA4 | t159319 | 11.113 | 605 | 661 |
| A0A1E7X363 | t159283 | 4.234 | 606 | 662 |
| A0A1Q7HM90 | t159036 | −0.492 | 607 | 663 |
| A0A1V1TTZ9 | t158998 | −0.613 | 608 | 664 |
| A0A1V2EYM1 | t159040 | 3.750 | 609 | 665 |
| A0A1V6E459 | t159120 | 1.008 | 610 | 666 |
| A0A1Y0G594 | t159236 | 1.645 | 611 | 667 |
| A2V8B3 | t159176 | 4.758 | 612 | 668 |
| A9MKQ8 | t158774 | −0.548 | 613 | 669 |
| C0SPA5 | t158820 | 1.113 | 614 | 670 |
| D8MZF3 | t159280 | 6.234 | 615 | 671 |
| F0IX07 | t159318 | 0.371 | 616 | 672 |
| H1ZV38 | t158442 | 1.694 | 617 | 673 |
| J1KN15 | t158976 | 4.008 | 618 | 674 |
| J5T2P7 | t159183 | −0.161 | 619 | 675 |
| K4IPR3 | t158247 | 5.444 | 620 | 676 |
| M1LUC5 | t158246 | 0.073 | 621 | 677 |
| M2N9N4 | t159152 | 0.669 | 622 | 678 |
| M2QHN1 | t159090 | 0.282 | 623 | 679 |
| M2YNQ9 | t159054 | 3.629 | 624 | 680 |
| M5FVU5 | t158291 | 0.565 | 625 | 681 |
| O74822 | t158955 | −0.500 | 626 | 682 |
| P08843 | t158458 | 0.460 | 627 | 683 |
| P0DMQ6 | t158893 | −0.444 | 628 | 684 |
| P13603 | t158263 | 0.645 | 629 | 685 |
| P14219 | t158869 | −0.048 | 630 | 686 |
| P14673 | t158726 | 0.952 | 631 | 687 |
| P14675 | t158728 | 6.056 | 632 | 688 |
| P20368 | t158816 | 0.798 | 633 | 689 |
| P25141 | t158333 | 3.677 | 634 | 690 |
| P28032 | t158454 | 2.887 | 635 | 691 |
| P39451 | t158390 | 5.500 | 636 | 692 |
| P39849 | t158243 | 0.516 | 637 | 693 |
| P40394 | t158613 | 3.460 | 638 | 694 |
| P42328 | t158520 | 2.065 | 639 | 695 |
| Q2FJ31 | t158326 | 1.024 | 640 | 696 |
| Q38707 | t158580 | −0.105 | 641 | 697 |
| Q99W07 | t158330 | 1.597 | 642 | 698 |
| S0EJ18 | t159328 | 11.185 | 643 | 699 |
| W5YKG3 | t159122 | 0.782 | 644 | 700 |

TABLE 7
Conserved amino acids in enzymes with increased LeuDH activity
relative to SEQ ID NO: 27.

| Corresponding Position in | |
|---|---|
| SEQ ID NO: 27 | Amino Acid |
| 13 | V |
| 16 | W |
| 42 | Q |
| 43 | T, Y, F, E, W |
| 44 | I, H, K, Y |
| 67 | T, E, A, S, K |
| 71 | K |
| 73 | S |
| 76 | R, H, Y, S, K, W |
| 92 | Y |
| 93 | H |
| 95 | G |
| 100 | G |
| 105 | C |
| 111 | G |
| 113 | M |
| 115 | N, V |
| 116 | R, N, W |
| 120 | A |
| 122 | D |
| 136 | E |
| 140 | D |
| 141 | M |
| 160 | S |
| 185 | F |
| 196 | N |
| 228 | Y |
| 248 | M |
| 256 | C |
| 293 | Q, C |
| 296 | K, N |
| 297 | R, Q, K |
| 300 | C, D |
| 302 | T, S |
| 305 | C |
| 319 | F |
| 330 | M |

TABLE 8
Conserved amino acids in enzymes with increased KivD activity
relative to SEQ ID NO: 29.

| Corresponding Position in | |
|---|---|
| Position in SEQ ID NO: 29 | Amino Acid |
| 33 | Y |
| 44 | Q |
| 117 | M |
| 129 | I |
| 185 | W |
| 190 | I |
| 225 | I |
| 227 | Y |
| 311 | L |
| 312 | G |
| 313 | T |
| 328 | P |
| 341 | W |
| 345 | H |
| 347 | C |
| 420 | R |
| 494 | D |
| 508 | C |
| 550 | F |

TABLE 9
Conserved amino acids in enzymes with increased ADH activity
relative to SEQ ID NO: 31.

| Corresponding Position | |
|---|---|
| in SEQ ID NO: 31 | Amino Acid |
| 9 | P |
| 16 | G |
| 23 | Q |
| 28 | R |
| 30 | A |
| 93 | K |
| 98 | L |
| 99 | R |
| 114 | P |
| 115 | K |
| 119 | Y |
| 194 | Y |
| 242 | P |
| 249 | K |
| 255 | E |
| 260 | D |
| 269 | H |
| 281 | Q |
| 325 | L |
| 333 | M |
| 334 | P |
| 348 | Q |

### EQUIVALENTS

[0197] Those skilled in the art will recognize, or be able to ascertain using no more than routine experimentation, many equivalents to the specific embodiments of the invention described in this disclosure. Such equivalents are intended to be encompassed by the following claims.

[0198] All references, including patent documents, disclosed in this application are incorporated by reference in their entirety, particularly for the disclosure referenced in this disclosure.

The application's sequence listing, which the Patent Office published only in electronic form, follows.

SEQUENCE LISTING (700 sequences)

SEQ ID NO: 1 - DNA, 1080 bp, Artificial Sequence
  Synthetic polynucleotide
atgaacatcttcaagaaaatggaggaatttaattatgaacaactggtctacttctacgacagcgaaacggaactcaaaggtattacctgtatacacaacacaactttagggccggcattgggcggtacccgcctttggaactataactctgaggaagatgccgttgaagacgtaatccgtctggctcggggcatgacttacaaagcggcttgcgccggtctgaatctgggcggcggtaaaaccgtgctgatcggtgatgctaaaaagattaaatcagagtcctacttccgtggactggggcgctacgttcagtcgctgaacggcagatatatcaccgcggaagacgtaaatacttctacgaaggatatggcatacgttgctatggaaactgactatgtggtaggcctgggaggtaaatccggcaaccctagtccagttactgcttacggtgcatttatgggtatcaaagcggcgctgatgaaaaaatttgaggatagctctattgaaggccgaaccttcgcagtgcagggtgctgggcagacgggttactatcttatcgattacctcctaggcaacaacaagttcaaagaaaaggctaaaaaaatttacttcaccgaaattaacgagagctatatcgagcgtatgaacaaagaacatccggaagttgaatttatttccccggacaaaatctactcgctggaagtagacgtcttcgtgccctgcgccctgggcaaaatcgttaatgacaaaactatcgatgaatttaagtgtccgatcatcgcaggtactgcaaacaacgtactggaaagggaagcgcacggcaacatgcttaaagaacgtggcattctttacgccccggactatgtgatcaatgctggtgggctgatcaacgtttaccacgagctgaacggttacaataaagagaacgctattctggaagtggaattaatttatgatcgcctactggaaatattcaacatcgctgattctctgaacatcagcaccaatatcgctgccaacgagttcgcggaaaaacgtatcaagcaaattaagtccttgaaaaacaacttcattaaacgc

SEQ ID NO: 2 - protein, 360 aa, Cetobacterium ceti
MNIFKKMEEFNYEQLVYFYDSETELKGITCIHNTTLGPALGGTRLWNYNSEEDAVEDVIRLARGMTYKAACAGLNLGGGKTVLIGDAKKIKSESYFRGLGRYVQSLNGRYITAEDVNTSTKDMAYVAMETDYVVGLGGKSGNPSPVTAYGAFMGIKAALMKKFEDSSIEGRTFAVQGAGQTGYYLIDYLLGNNKFKEKAKKIYFTEINESYIERMNKEHPEVEFISPDKIYSLEVDVFVPCALGKIVNDKTIDEFKCPIIAGTANNVLEREAHGNMLKERGILYAPDYVINAGGLINVYHELNGYNKENAILEVELIYDRLLEIFNIADSLNISTNIAANEFAEKRIKQIKSLKNNFIKR

SEQ ID NO: 3 - DNA, 1089 bp, Artificial Sequence
  Synthetic polynucleotide
atggtagagatcaaggctttgacggacacttccgtgtttgggcaaattgcagaacaccagcatgaacaggtcgttttctgccacgatcacgaaaccggcctccgtgcgatcatcggtattcataacacagttcttggccccgccttaggtggaactcgcatgtggcactatgcttctgacgcagaggcgctgaatgatgttctgcgtctgtcgcgcggtatgacctacaaagctgctataagtggcctgaacctgggtggcggtaaagcagtgatcattggggacgccaaaaccctgaaaaccgaagcgctgctgcggaagttcggcagattcgtaaaaaacctgaatggtaaatacatcactgctgaagatgtcaacatgactacaaaagacatggagtacatcaggatggaaaccaagcacgttgctggcttacctgaatcaatgggtggaagcggtgatccgtccccggtgactgcatttggtacgtatatgggcatgaaagcggcggccaaaaaagcgttcggctctgactctctggctggcaaacgtatcgctgttcagggtgtaggtcatgtcggcacttacctgttggagtatttgcagaaggaaggtgctaagctggtactgactgactactatgaagatcgtgccctggaggcagcaacgcgttttggcgcaaaaatggttggcctggacgaaatttacgatcaagacgttgatatctacagtccatgtgctcttggagctaccattaacgatgacactatcggtcgcctgaaatgccaggttatcgctggttgcgcaaacaaccagctgcaaaacgaaaatgtgcatggcccggccctcgtggagcgcgggattgtgtacgctccggatttcctgatcaacgccggcggcctgatcaacgtttactcggaagtagtgggtagctcccgtcagggtgctttgaaccagaccgaaaaaattttcgacatcaccactcaggttctaaacaaagcggaacaagagggttctcacccgcaggcggcagctactaagcaggctgaagagcgtattgcaagcctgggcaaagttaagagcacctac

SEQ ID NO: 4 - protein, 363 aa, Hymenobacter daecheongensis
MVEIKALTDTSVFGQIAEHQHEQVVFCHDHETGLRAIIGIHNTVLGPALGGTRMWHYASDAEALNDVLRLSRGMTYKAAISGLNLGGGKAVIIGDAKTLKTEALLRKFGRFVKNLNGKYITAEDVNMTTKDMEYIRMETKHVAGLPESMGGSGDPSPVTAFGTYMGMKAAAKKAFGSDSLAGKRIAVQGVGHVGTYLLEYLQKEGAKLVLTDYYEDRALEAATRFGAKMVGLDEIYDQDVDIYSPCALGATINDDTIGRLKCQVIAGCANNQLQNENVHGPALVERGIVYAPDFLINAGGLINVYSEVVGSSRQGALNQTEKIFDITTQVLNKAEQEGSHPQAAATKQAEERIASLGKVKSTY

SEQ ID NO: 5 - DNA, 1089 bp, Artificial Sequence
  Synthetic polynucleotide
atggtagagatccaggctttgccggaaacttccatttttgggcaaatcgcagaccaccagcatgaacaggtggtcttctgccacgatcacgaaaccggcctccgtgcgataatcggtattcataacacggttcttggccccgccttaggtggaactcgcatgtggcactatgctaccgaggcagaagcgctgaatgacgttctgcgtctgtctcgcggtatgacctacaaggctgctatctcgggcctgaacctgggtggcggtaaagcagtaatcattggggatgccaaaacaatcaaaaccgaagcgctgctgcggaaattcggcagattcgtgcagaacctgaatggtaaatacatcactgctgaagacgttaacatgactacaaaggatatggagtacattaggatggaaaccaaacacgtcgctggcttacctgaaagtatgggtggaagcggtgacccgtcaccggtaactgcatatggtacgtacatgggcatgaaagcggcggccaaaaaggcgtttggctctgattccctggctggcaaacgtatcgctgttcaaggtgtgggtcatgttggcacttatctgcttgagcatttgaccaaagaaggtgctcagattgtgctgactgactactataaggaacgtgccgaggaagcaggcgcgcgttttggcgcacaggttgttggcctggacgatatctacgatcaagaggtcgacatttactctccatgtgctctcggtgctaccatcaacgatgacactatcgatcgcctgcgttgcgctgttgtagccggttgcgcaaacaaccagctgaaagaagaaaacgtccacggtccggcgctggttgagcgcgggatagtatacgccccagacttcctgatcaatgcaggtggcctgattaacgtgtatagcgaagttacagggtctacccgtcagggggctttaactcagaccgaaaaaatctatgactacacactccaagttctggaaaaagccgcggctgaaggtctgcacccgcagcaggctgcgatccgtcaggcggaacaacgcatcgctgcaattggtaaggtgaaaagcacctac

SEQ ID NO: 6 - protein, 363 aa, Unknown
  Hymenobacter sp. CRA2
MVEIQALPETSIFGQIADHQHEQVVFCHDHETGLRAIIGIHNTVLGPALGGTRMWHYATEAEALNDVLRLSRGMTYKAAISGLNLGGGKAVIIGDAKTIKTEALLRKFGRFVQNLNGKYITAEDVNMTTKDMEYIRMETKHVAGLPESMGGSGDPSPVTAYGTYMGMKAAAKKAFGSDSLAGKRIAVQGVGHVGTYLLEHLTKEGAQIVLTDYYKERAEEAGARFGAQVVGLDDIYDQEVDIYSPCALGATINDDTIDRLRCAVVAGCANNQLKEENVHGPALVERGIVYAPDFLINAGGLINVYSEVTGSTRQGALTQTEKIYDYTLQVLEKAAAEGLHPQQAAIRQAEQRIAAIGKVKSTY

SEQ ID NO: 7 - DNA, 1098 bp, Artificial Sequence
  Synthetic polynucleotide
atgatcttcgagacaatttctacgtcgaatcacgaagaagttgtgtattgccataacaaggacgccggcttgaaagcaatcatcgcgattcacaacactgtactcggtccggctctgggtggcactcgcatgtggccctacgctagcgaagaggaagcactgaaagatgtccttcgtttatcccgtgggatgacctacaaagctgcggtttcaggtctaaacctgggcggcggtaaagctgtgatctggggtgatccgaataaagacaagtctgaagcgctgtttagagccttcggacggtttgtaaacagcctgggcggacgctacattaccgcggaggacgttggcattgatgttaacgacatggaatatgtgctgcgtgaaactgattacgtcaccggtgtacatcaggttcacggtgggagtggtgatccttctccattcaccgcatatggcactctgcaaggcctgatggccgctctgcaagtgaaattcggtaacgaagacgtaggcaattacagctacgctgttcagggtgtgggtcacgttggcatggaatttgttaaactgctgcgtgagcgcggtgcaaaggttttcgtcactgacatcaacaaagatgcggtccagcgtgctgtggacgaatttggttgtgaggcagtagccctggatgaaatctatgacgttgattgcgacgtgtactccccgaccgctctgggcggcaccgtgaacgataaaactttaccgcgtctgaaatgtaaggtaatctgcggtgcggcaaacaaccagttagctaatgatgagataggcgtggaactggaaaaaaaaggcatcctctatgctccggactacgcggtcaacgcgggtgggctgatgaacgttagcctggaaatcgatggatacaaccgcgaacgtgcgatgcgtatgatgcgtaccatttattacaatttgggtcgcattttcgaaatctctaagcgcgacggcatccctacattccgagccgccgatcgtatggctgaagaacgcataacggccatcggtaaactgcgtttaccgcatttgggcgctgcggcaccgcgcttccagggccgacgtggcaac

SEQ ID NO: 8 - protein, 366 aa, Unknown
  Arenimonas sp SCN 70-307
MIFETISTSNHEEVVYCHNKDAGLKAIIAIHNTVLGPALGGTRMWPYASEEEALKDVLRLSRGMTYKAAVSGLNLGGGKAVIWGDPNKDKSEALFRAFGRFVNSLGGRYITAEDVGIDVNDMEYVLRETDYVTGVHQVHGGSGDPSPFTAYGTLQGLMAALQVKFGNEDVGNYSYAVQGVGHVGMEFVKLLRERGAKVFVTDINKDAVQRAVDEFGCEAVALDEIYDVDCDVYSPTALGGTVNDKTLPRLKCKVICGAANNQLANDEIGVELEKKGILYAPDYAVNAGGLMNVSLEIDGYNRERAMRMMRTIYYNLGRIFEISKRDGIPTFRAADRMAEERITAIGKLRLPHLGAAAPRFQGRRGN

SEQ ID NO: 9 - DNA, 1086 bp, Artificial Sequence
  Synthetic polynucleotide
atgcagatcttcgacactttgcaatcaatgggccatgagcaggtggtcctatgtagcgataagaccacgggtctgcgcgccattatcgctatacacgatacatccttagggccggcgcttggtggtacccgtatgtggcagtatgcaactgacgacgatgctattactgacgcactccgtctgtctcggggcatgacctacaaagctgcggtttctggcgtaaatctgggcggtggtaaagccgttatcatcggaaaccctcacagtgataaaagcgaagcgctgtttcgcgcttacggcagaatggtggaatcccagcgtgggcgttacatcaccgccgaagacgttggtactagcgtacgtgatatggagtggattcgcatggaaaccaaatatgtaacgggcgtgggtggcaacggaggctctggtgacccctctccagttaccgctctgggtgtttactcgggcatgaaggcatgcgctaaatcagtctatggtactgatgcgctgagcggtaaaaggatcgtggttcagggcgcgggtaacgttgcatcccatctggttcacagtctggtaaaagaaggcgctgtggttttcgtcactgacatctacgaagaaaaggccaaagcattagcggctgaaacgggcgctaccgtgattcgcaccgacgaggtttttactacacaatgcgatatcttctctccgaacgctctgggggccgtcctgaacgatgaaactattccgcagctcacatgcgctatcgtagctggtggtgcaaacaatcagcttaaaatcgaacaacgtcacgccacggctctgcaagagaaaggcattctgtatgcgccggattacgtaatcaacgccgggggcctcatgaatgtggcgagcgaagttgacggctacaaccgtgaaaaggttatgcgccaggctgaaggtatttacgatattactatgaacatcctaaataccgcgcgtgagcgtaacatcctgaccatcgaagcatccaacgcgattgctgaagagcggatcaacaaagttcgccatgttcacgggaacttcatcggttccccgtctattcgcggagta

SEQ ID NO: 10 - protein, 362 aa, Candidatus kapabacteria
MQIFDTLQSMGHEQVVLCSDKTTGLRAIIAIHDTSLGPALGGTRMWQYATDDDAITDALRLSRGMTYKAAVSGVNLGGGKAVIIGNPHSDKSEALFRAYGRMVESQRGRYITAEDVGTSVRDMEWIRMETKYVTGVGGNGGSGDPSPVTALGVYSGMKACAKSVYGTDALSGKRIVVQGAGNVASHLVHSLVKEGAVVFVTDIYEEKAKALAAETGATVIRTDEVFTTQCDIFSPNALGAVLNDETIPQLTCAIVAGGANNQLKIEQRHATALQEKGILYAPDYVINAGGLMNVASEVDGYNREKVMRQAEGIYDITMNILNTARERNILTIEASNAIAEERINKVRHVHGNFIGSPSIRGV

SEQ ID NO: 11 - DNA, 1065 bp, Artificial Sequence
  Synthetic polynucleotide
atgacaacgttcgagtatatggaaaagtacgactacgaacaactggtcctttgtcaggataacacttctggcctcaaagcagtaatttgcatccatgacaccactctggggccagctttgggtggcacccgtatgtggaattacgccagtgaagaagatgctatcctggatgcgttacgcctggcgcgaggtatgacttataaaaacgctgccgcaggtctgaacctgggcggcggtaaagctgttattatgggcgacagccgtacccagaaatcagaggaactgtttcgcgcgttcggtcgttacgtgcaggcgctgaacggccgttatatcaccgctgaggacgttggtactaacgtacaagatatggactggatacacatggaaacaaagtttgtgaccgggatctcctcttcgtacggtgctagcggagatccgtcccctctgaccgcactgggcgtttaccgcggtatgaaagccgccgcaaaagaagcgttcggcagcgactctttagagggtaaaactgttgctattcagggtcttggccacgtcggctattacctggcaaaacacctcactgatgaaggcgctaaactgatcgtgacggatatcaattctgaagccgttaagagggtagcgcgtgagttcgttgctaccgcagtccgtaccgaagaaattttcggcgttaaatgcgacatctttgcgccctgtgctctgggtgcagttatcaacgatgaaaccattccgcagctgaagtgccaggtagttgccggtgctgcgaacaatgtgttgaaagaggatcgccatggtgacgaactatacgaaaaaggaatcctgtacgctccggactatgtaattaacgcgggcggcgttatcaacgtggccgacgaactggaaggttacaacgctgaacgtgctctgaaaaaagttgagatggtatatgataatgtggcacgcgtcatcgctattgccaagcgtgaccatatcccgacttataaagcagcggaccgaatggctgaggaacgtattgcgaaaattggcaaagtttccaacactttcctgcgc

SEQ ID NO: 12 - protein, 355 aa, Peptococcaceae bacterium
MTTFEYMEKYDYEQLVLCQDNTSGLKAVICIHDTTLGPALGGTRMWNYASEEDAILDALRLARGMTYKNAAAGLNLGGGKAVIMGDSRTQKSEELFRAFGRYVQALNGRYITAEDVGTNVQDMDWIHMETKFVTGISSSYGASGDPSPLTALGVYRGMKAAAKEAFGSDSLEGKTVAIQGLGHVGYYLAKHLTDEGAKLIVTDINSEAVKRVAREFVATAVRTEEIFGVKCDIFAPCALGAVINDETIPQLKCQVVAGAANNVLKEDRHGDELYEKGILYAPDYVINAGGVINVADELEGYNAERALKKVEMVYDNVARVIAIAKRDHIPTYKAADRMAEERIAKIGKVSNTFLR

SEQ ID NO: 13 - DNA, 1686 bp, Artificial Sequence
  Synthetic polynucleotide
atgtcggagatcacattgggtagataccttttcgaacgcttaaaccaactgcaagtgcagactatttttgggctgcccggcgacttcaatctgtccctgctggataagatctatgaagttgatggcatgcgttgggcaggtaacgctaacgaactcaacgccgcttacgcggctgacggttatagccgtgtcaaaggcctcgcatgtctggttaccacttttggtgtaggcgagctaagtgcgctgaatggtgtgggtggcgcttacgcagaacacgttgggctgctgcatgtagtgggcgtcccatcaatctctagccaggcgaaacagctgctgctgcaccataccctgggtaacggagatttcacggttttccaccgcatgtccaacaacatttctcagaccacggcttttatcagcgacattaattctgctcctggtgaaatcgataggtgcatccgtgaggcctgggtacatcagcgtccggtttacgtcggcctgccggcgaacctagttgacctgactgtgccggcgtctctgttagacactccgatcgatctgtccttgaaaaaaaacgacccggatgcccaggaagaagttattgaaaccgtccttgatctggtagacaagtctaaaaaccctataatcttagttgacgcatgcgctagccgtcactcatgccgcgatgaagtacgccggttggtggactccaccagcttcccggttttcgttactccaatgggtaaatctgctgtaaatgagagtcacccgcgttttggcggtgtttacgtgggcagcctcagcgagccaaacgtaaaagaagccgttgaaaacgctgacctggtgctgtccataggcgccctgttgagcgacttcaacactggatcgttctcttattcctacaaaactaagaacattgttgaatttcactctgattataccaaaatccgtcaagcaacgttcccgggtgttcagatgaaagaagcactgaatgtcctgttggaaaaaatcccgagccatgtcgctaactacaaacctctgccggttccgcagcgtcgcgttattccgagcccaggggataaggctgcgatctctcaggagtggctgtggtcgcgtctgtctagctggttccgcgagggcgacatcgtcattacagaaaccggtaccagtgcgtttggaattgtacagtcctatttcccagataactgcatcggcatcagtcaggtgctgtggggttcgatcggcttcaccgtaggtgcaacgctgggcgcggtgatggctgcacaagaaatcgatccgaaaaaacgtgtgattttatttgtcggtgacggttctctgcaacttactgtacaggaaatttctaccatggttaagtgggaaaccactccctacctgtttgtgctgaacaacgatgggtacactatcgaacgccttatccatggcgagactgctacgtataacgatattcagccgtgggataatctgggtctgttgccgctgttcaaagctcgtgactacgaaaccaaccgagttgcgactgtaggcgaaattgaagcgctattcaacaattcagctttcaatgagaatacaaagatccgtatggtggaggtcatgctgccgcggatggatgcaccacagaacctggttaaacaggctgaattttcctccaagaccaacagcgaaaac

SEQ ID NO: 14 - protein, 562 aa, Candida auris
MSEITLGRYLFERLNQLQVQTIFGLPGDFNLSLLDKIYEVDGMRWAGNANELNAAYAADGYSRVKGLACLVTTFGVGELSALNGVGGAYAEHVGLLHVVGVPSISSQAKQLLLHHTLGNGDFTVFHRMSNNISQTTAFISDINSAPGEIDRCIREAWVHQRPVYVGLPANLVDLTVPASLLDTPIDLSLKKNDPDAQEEVIETVLDLVDKSKNPIILVDACASRHSCRDEVRRLVDSTSFPVFVTPMGKSAVNESHPRFGGVYVGSLSEPNVKEAVENADLVLSIGALLSDFNTGSFSYSYKTKNIVEFHSDYTKIRQATFPGVQMKEALNVLLEKIPSHVANYKPLPVPQRRVIPSPGDKAAISQEWLWSRLSSWFREGDIVITETGTSAFGIVQSYFPDNCIGISQVLWGSIGFTVGATLGAVMAAQEIDPKKRVILFVGDGSLQLTVQEISTMVKWETTPYLFVLNNDGYTIERLIHGETATYNDIQPWDNLGLLPLFKARDYETNRVATVGEIEALFNNSAFNENTKIRMVEVMLPRMDAPQNLVKQAEFSSKTNSEN

SEQ ID NO: 15 - DNA, 1698 bp, Artificial Sequence
  Synthetic polynucleotide
atgacaagcatggacaattctagtcagcaaatccccatgggtcagaaaaccgtcggggagtacttgttcgattgcctcaagcaggaaggcataacggaaatctttggtgtgccgggcgattataacttcaccttactggacgccctgcaagaatacaacggtattcgtttctataacggccgcaacgagctgaatgctggctacgcagctgacggttacgcgcgtattaaaggaatctccgcgctaatcactacttttggtgttggtgaactgtcagcaactaacgctattgccggcgcgaacagcgaacacgtacctatcatccatattgttgggtccccaccggaaaaagctcagaaggagcgcaaactgatgcaccataccctgatggatggcaacttcgacgtattccgtaaagtttacgaaccgcttaccgcttatactaccatcgtcacggcagataacgcgcggatggagatcccggctgctatccgtattgccaaagaacgaagaaagccagtgtacctggttgttgcggatgacgtagtggctaaaccgattactggtcgtgaagtcccggcatctcctctgccggctagcaatcaggacaaactgcttgctgcggttgagcacgttaggcgtcttctggaacctgcacgccagccggtaatattggttgatgtgaaagccatgcgctttggattacagaccgccgtcagggaactggcaaacactatgaatgttccagtggctacaatgatgtatggcaaaggcactttcgacgaaacccatccaaactacatcggcgtatatgcgggtacgttcggttcgtctgaagttcaatctatcgtagaaaactcggactgtgttatcgccgttggtttggtgtggagcgatactaacaccgcaaactttactgcgaaattaaacccgcacaataccattgaggttcagccgacaaaagtgaaaatcgctgagtcccagtaccccgatgtccgtgccgcagacatcctgcaagaaatgcagaagctggattatcgtagccagtctaaaccggaaaaaatctcatttccgtacgaagagataaccgggtccagtgatgaaccgctccgcgcagaaaactacttccctcgttttcagcgcatgctgaaggaaaacgatattgttatcgctgagaccggcacgttctactacggtatgagtcaagttaaactgcccgcgaacactacgtacatcatgcagggcggctggcagagcattggttatgccaccccggcggcatacggcgcgtctatcgctgctccggaccgtcgcgtcttactgttcactggtgatggctccatgcagctgaccgcacaggaaatctcttctatgctttattacggttgcaagccgattatctttgtactgaacaatgacgggtacaccattgagcggtatctgaatgtagaaatctcccctgacgaacaaaactataacgatattccgaactggtcttatactaaactggctgaggcgttcggtggtgaactgttcactaaaacagtgcgtaccaatgaagaattggatgaagcgatcacacaggctgagcaagagtacgccgaaaaactgtgcctgatcgagatgattgctgctgatccaatggacgcaccggaatacatgcaccgtatccgtaaccataagcaggaacagaaaaag

SEQ ID NO: 16 - protein, 566 aa, Unknown
  Bacillus sp. FJ AT-1801
MTSMDNSSQQIPMGQKTVGEYLFDCLKQEGITEIFGVPGDYNFTLLDALQEYNGIRFYNGRNELNAGYAADGYARIKGISALITTFGVGELSATNAIAGANSEHVPIIHIVGSPPEKAQKERKLMHHTLMDGNFDVFRKVYEPLTAYTTIVTADNARMEIPAAIRIAKERRKPVYLVVADDVVAKPITGREVPASPLPASNQDKLLAAVEHVRRLLEPARQPVILVDVKAMRFGLQTAVRELANTMNVPVATMMYGKGTFDETHPNYIGVYAGTFGSSEVQSIVENSDCVIAVGLVWSDTNTANFTAKLNPHNTIEVQPTKVKIAESQYPDVRAADILQEMQKLDYRSQSKPEKISFPYEEITGSSDEPLRAENYFPRFQRMLKENDIVIAETGTFYYGMSQVKLPANTTYIMQGGWQSIGYATPAAYGASIAAPDRRVLLFTGDGSMQLTAQEISSMLYYGCKPIIFVLNNDGYTIERYLNVEISPDEQNYNDIPNWSYTKLAEAFGGELFTKTVRTNEELDEAITQAEQEYAEKLCLIEMIAADPMDAPEYMHRIRNHKQEQKK

SEQ ID NO: 17 - DNA, 1653 bp, Artificial Sequence
  Synthetic polynucleotide
atgtcgacgacaaccgttggtgactacttgctgtatcgcttaaacgaaatcggcattgagcacctcttcggagtgccaggtgattacaatctgcaatttctggatcatgtaatcgaccaccctcagctgacttgggtcggctgcactaacgaacttaacgctgcctacgcagctgatggttatgcgcgttgtcgtccggctgcggcactgctgaccaccttcggggttggcgaactgagcgctattaatggcatcgcaggttcctacgcggagtatctgccggtaatacatatcgttggtgcaccgagtctatcagcccagcagcagggcgacctgattcaccactctcttggcgaaggtgatttttccagcttcctgaggatgtcccaaccggtgtctgttgcgcaggctgctctgactcctgataacgcatgcaaggaaatcgaccgcgtactggcggaagtcctcattcagcgtcgtcccggctacctgctgctgtctaccgacgtggctgctgcgccggcggctctgccacaaagcactctttctttgccgaccgccccggatcatcgcgcagttctggctgctttcagcgacgctgctgagcagatgctggctcaggccaaaagcgtctctctactggcggactttctggctgatcgtttcggtgttactcgagcactggccgcgtggcttcagcaggttccgctaccgcacgccactctgttaatgggtaaaggcgttctgagtgaacagcaaccagggttcgtgggtacctacgctggtgcggcatctatcgattcgacgcgtggcgcaatcgaagaagctggggtaattatcggagtgggagttagattttccgacactatcacagcaggcttctcgcagcagatcgacgcccgccgttttatagacattcaacccttcttctctcgtattggcgatcgccagtttgatcacctgccgatgcaggctgccgtcgcagccctgcatcaactgtgtcttcgttatcagcagcagtggtctatcaccgctcctagcccgcctgcactgccgccggctgctggtagcgagctgtcccagaacgcattctggcaggcgatgcagaacttcatccgccctggggacctgttggtggccgaccaaggtactgcggcgttcggcgcagcggcgctgcgcttaccgcagaattgccagctgcttgtgcagccgctgtggggctcaatcggttacagtctgccggccacctttggtgctcagacggcagatacagagcgtcgtgtaatcctaatcattggcgatggttcagcgcaattaactattcaggaactttccagtatgatgcgtgacggcttgaaacctatcatctttctcctgaacaacaacggttacaccgttgaacgggcgattcacggcgcggagcaacgttataacgatatcgctgcttggaattggacccaactgccccaggcgctgagtgttcattgcccagcgcagagctggcgagtcgttgaaacggtgcagctgaccgacgtaatgaaagtcatcgctgcttctccgcgtctgagcttggtagaagttgttctgcctgcaatggatgtcccaccgctgctgcaagcagtgagtgccgctctgaaccagcgcaactcctct

SEQ ID NO: 18 - protein, 551 aa, Erwinia iniecta
MSTTTVGDYLLYRLNEIGIEHLFGVPGDYNLQFLDHVIDHPQLTWVGCTNELNAAYAADGYARCRPAAALLTTFGVGELSAINGIAGSYAEYLPVIHIVGAPSLSAQQQGDLIHHSLGEGDFSSFLRMSQPVSVAQAALTPDNACKEIDRVLAEVLIQRRPGYLLLSTDVAAAPAALPQSTLSLPTAPDHRAVLAAFSDAAEQMLAQAKSVSLLADFLADRFGVTRALAAWLQQVPLPHATLLMGKGVLSEQQPGFVGTYAGAASIDSTRGAIEEAGVIIGVGVRFSDTITAGFSQQIDARRFIDIQPFFSRIGDRQFDHLPMQAAVAALHQLCLRYQQQWSITAPSPPALPPAAGSELSQNAFWQAMQNFIRPGDLLVADQGTAAFGAAALRLPQNCQLLVQPLWGSIGYSLPATFGAQTADTERRVILIIGDGSAQLTIQELSSMMRDGLKPIIFLLNNNGYTVERAIHGAEQRYNDIAAWNWTQLPQALSVHCPAQSWRVVETVQLTDVMKVIAASPRLSLVEVVLPAMDVPPLLQAVSAALNQRNSS

SEQ ID NO: 19 - DNA, 993 bp, Artificial Sequence
  Synthetic polynucleotide
atgcagacggcgttcttgtataagccaggtcacgaaaacttagtgcgctcggagatcccgatacctaaagctgggcgtggcgaagtcgttctggaaattaaagccgctggcatgtgccattccgatctgcacgttctcgacggtggaatccccctgccgggtcaatttgtaatgggccatgaaatcgttggtactattcacgagatcggccaggacgtgaccggtttcaaacagggcgatctgtacgcagtccacggcccgaatccgtgtggtatttgcaccctgtgcagagaaggatttgataacgactgcactacagtggcgaaaaccggtcaatggttcggactgggtcttgacggcggctaccagaagtatatccgtatcccgaacgtaaggtctatcgttaaagttccagaaggtgtttcagctgaggcagctgcgagctgtactgatgcagtactgaccccgtaccgtgcactaaaacaggctggcgccagcaactctactcgggtactgattctgggtctgggtggcttaggtctgaatgcccttaaactggctaagaccttcggcagttacgtttacgcatctgacctgaaaccttctgcgcgtgaagctgctaaggccgctggggcggatgaagtgctggagtccctgcccgaagacccgctgggtgttgatatcgtgttagacgtcgttggcgtgcagagcaccttcaacctcgctcaaaaacacgttggcccgcgtggcatcattgtacctgtaggcctggcatccccacagctttcgtttaacctaacggatctggcgctccgcgaaattcgtgttcagggcactttttggggcacgagcaatgagctggctgaatgtctgcgcctgtgccagctgggcctgatcaacccgaaatatactgtggtgcctcttgaagaagcgccgaaatatatggaagcaatggctcatgggaaagtagaaggtcgtatcgttttccacccg

SEQ ID NO: 20 - protein, 331 aa, Tortispora caseinolytica
MQTAFLYKPGHENLVRSEIPIPKAGRGEVVLEIKAAGMCHSDLHVLDGGIPLPGQFVMGHEIVGTIHEIGQDVTGFKQGDLYAVHGPNPCGICTLCREGFDNDCTTVAKTGQWFGLGLDGGYQKYIRIPNVRSIVKVPEGVSAEAAASCTDAVLTPYRALKQAGASNSTRVLILGLGGLGLNALKLAKTFGSYVYASDLKPSAREAAKAAGADEVLESLPEDPLGVDIVLDVVGVQSTFNLAQKHVGPRGIIVPVGLASPQLSFNLTDLALREIRVQGTFWGTSNELAECLRLCQLGLINPKYTVVPLEEAPKYMEAMAHGKVEGRIVFHP

SEQ ID NO: 21 - DNA, 1050 bp, Artificial Sequence
  Synthetic polynucleotide
atgcgcagcatgcagtttgatgagtacggtgcacccctgaaagcgttctcatatgaagacccgaccccgcaagggaaggaagtagtcgttaggatcgaagcctgtggtgtgtgccactctgatattcatcttcacgagggctacttcgacatgggcggtggcaataaagctgatgttactcgtgctcgcgaactcccttttacattgggtcatgaaatcgttggcgaagtggtagcaactggaccaggtgtcaccggcgctaaaccgggcgacaaacgtattgtgtacccgtggatcgggtgcggcgactgcccgaaatgcaacagtggtgaggatcagtcctgtgcgcgtccacgtaacctgggtgttcacgttgacggtggctattcgacgcacgtaaagataccggacgaaaaattcctgttcgcctacgatggtattcctactgagttagcgggaacctatgcttgcagcggcatcaccgcttatggtgcactgatgaaagcaaaggaagcggctgaaagatctggctacatcggtctgattggcgctggtggcgttggcatggctggtctgatgctggccaaagcagcgatcggggctaaaactgtagtctttgatatcgacgacgcaaaactggaagctgcgacccgtgccggggcggattacgtgttcaactccggtgcaaaagaaacacgcaaggaagttatgaaactaacgaatggtggcctgtctggtgctgttgatttcgttggcagcgataaaagcgctctgtttggaatcaacgccttgggtcagaacggcgtgctggtcataattggactgttcggtggcgctatgactgttccggtacccctgttcccgctgaaagggatcaccgtacgtggctcatacgtaggttccctgcaagagatgagtgatatgatggagttagttcgcgctgggaaagttcctccgatgccggtaaaaactcggccactggacgctgcctgggaaacccttgaggatctacgccatggtaaaatcgtgggccgtgttgttctgacccca

SEQ ID NO: 22 - protein, 350 aa, Rhizobiales bacterium
MRSMQFDEYGAPLKAFSYEDPTPQGKEVVVRIEACGVCHSDIHLHEGYFDMGGGNKADVTRARELPFTLGHEIVGEVVATGPGVTGAKPGDKRIVYPWIGCGDCPKCNSGEDQSCARPRNLGVHVDGGYSTHVKIPDEKFLFAYDGIPTELAGTYACSGITAYGALMKAKEAAERSGYIGLIGAGGVGMAGLMLAKAAIGAKTVVFDIDDAKLEAATRAGADYVFNSGAKETRKEVMKLTNGGLSGAVDFVGSDKSALFGINALGQNGVLVIIGLFGGAMTVPVPLFPLKGITVRGSYVGSLQEMSDMMELVRAGKVPPMPVKTRPLDAAWETLEDLRHGKIVGRVVLTP

SEQ ID NO: 23 - DNA, 1080 bp, Artificial Sequence
  Synthetic polynucleotide
atgacagcggagcagcaaaatggggtatccgactcacgccgtttcgaatttcaggaatttggtggccctatcgccccacagacctatcagctccccgcaccggctagcgatgaagttttgttaaaggtgaactactgcggtgtctgtcacagtgatgttcatcttcacgacggctacttcgagctgggtggcgataaacgtctgaacttcgctatgccgctgccgctgacgctgggtcacgaagtaattggcaccgttgtggctgtcggcgaccaggttactggtgtaaaaccgggggaccagcgactgatctatccgtggataggttgcggaaaatgcggcgcgtgtcaaaaaggagaagaaaacctgtgcgttactcctgcacatctgggcgtgaacaagccgggcggttacgctgatcacatcgttgtaccccattctcgctaccttctggacatttcgggtctgaacccgggtgatgccgctaccctcgcgtgctccggcctgaccactttcagcgcgatcaacaaagtgttgccgcttgcagatgaccagtggattgttgttatcggttgtggtggcctcggccagatggcgctgcgtatcctgcaagctatgggaattggcaatgttatcggtattgacctgtctgaagagaaacggaaactggctcatgaaagcggtgcacgtcactccttcgatccaaacactccgaagctgaaccgcgtggtcgccgaaacctgcccgggtacggtacaggccgcgttagactttgtgggcaatgagcaaactgctcagctggcactgtctctgcttggaaaaggtggcaaatatgttcctgtcgggctgcacggcggcgagctgcgttacccattgccgatcatcacgaacaaagctgtaagtatcatcggttcttacgttggtaccctgaaagaactggaagacttagttgctttcgccaaggaaaaaaatctgccgccaattcatattgaacaccgcccgctggaatcggcggctcaggccgtagaggacctggaaaaaggacaggttgctgggcgtgttatcctggatgcaggtaac

SEQ ID NO: 24 - protein, 360 aa, Alcanivorax dieselolei
MTAEQQNGVSDSRRFEFQEFGGPIAPQTYQLPAPASDEVLLKVNYCGVCHSDVHLHDGYFELGGDKRLNFAMPLPLTLGHEVIGTVVAVGDQVTGVKPGDQRLIYPWIGCGKCGACQKGEENLCVTPAHLGVNKPGGYADHIVVPHSRYLLDISGLNPGDAATLACSGLTTFSAINKVLPLADDQWIVVIGCGGLGQMALRILQAMGIGNVIGIDLSEEKRKLAHESGARHSFDPNTPKLNRVVAETCPGTVQAALDFVGNEQTAQLALSLLGKGGKYVPVGLHGGELRYPLPIITNKAVSIIGSYVGTLKELEDLVAFAKEKNLPPIHIEHRPLESAAQAVEDLEKGQVAGRVILDAGN

SEQ ID NO: 25 - DNA, 711 bp, Artificial Sequence
  Synthetic polynucleotide
atgaccgcacttacggaaggggcaaaactgtttgagaaagagataccgtatataaccgaactggaaggcgacgtagaagggatgaaatttataattaaaggcgaggggaccggggacgcgaccacggggaccattaaagcgaaatacatatgcactacgggcgacctgccggtaccgtgggcaaccctggtgagcaccctgagctacggggtccagtgtttcgccaagtacccgagccacataaaggatttctttaagagcgccatgccggaagggtatacccaagagcgtaccataagcttcgaaggcgacggcgtgtacaagacgcgtgctatggtcacctacgaacgcgggtctatatacaatcgtgtaacgctgactggggagaactttaagaaagacgggcacattctgcgtaagaacgtcgcattccaatgcccgccaagcattctgtatattctgcctgacaccgtcaacaatggcatacgcgtcgagttcaaccaggcgtacgatattgaaggggtgaccgaaaaactggtcaccaaatgcagccaaatgaatcgtccgcttgcgggcagtgcggcagtgcatataccgcgttatcatcacattacctaccacaccaaactgagcaaagaccgcgacgagcgccgtgatcacatgtgtctggttgaggtagtgaaagcggtcgatctggacacgtatcagtga

SEQ ID NO: 26 - protein, 236 aa, Artificial Sequence
  Synthetic polypeptide
MTALTEGAKLFEKEIPYITELEGDVEGMKFIIKGEGTGDATTGTIKAKYICTTGDLPVPWATLVSTLSYGVQCFAKYPSHIKDFFKSAMPEGYTQERTISFEGDGVYKTRAMVTYERGSIYNRVTLTGENFKKDGHILRKNVAFQCPPSILYILPDTVNNGIRVEFNQAYDIEGVTEKLVTKCSQMNRPLAGSAAVHIPRYHHITYHTKLSKDRDERRDHMCLVEVVKAVDLDTYQ

SEQ ID NO: 27 - protein, 366 aa, Bacillus cereus
MTLEIFEYLEKYDYEQVVFCQDKESGLKAIIAIHDTTLGPALGGTRMWTYDSEEAAIEDALRLAKGMTYKNAAAGLNLGGAKTVIIGDPRKDKSEAMFRALGRYIQGLNGRYITAEDVGTTVDDMDIIHEETDFVTGISPSFGSSGNPSPVTAYGVYRGMKAAAKEAFGTDNLEGKVIAVQGVGNVAYHLCKHLHAEGAKLIVTDINKEAVQRAVEEFGASAVEPNEIYGVECDIYAPCALGATVNDETIPQLKAKVIAGSANNQLKEDRHGDIIHEMGIVYAPDYVINAGGVINVADELYGYNRERALKRVESIYDTIAKVIEISKRDGIATYVAADRLAEERIASLKNSRSTYLRNGHDIISRR

SEQ ID NO: 28 - DNA, 1101 bp, Artificial Sequence
  Synthetic polynucleotide
atgacccttgagatttttgaatacctcgaaaaatatgattatgagcaggtcgttttctgtcaagacaaggaatcaggactgaaagcgatcattgctatccatgatactacactggggccagccttaggtggcacccgtatgtggacgtacgactcggaagaagcggcaattgaggatgccttgaggttagctaagggcatgacgtataaaaacgcggcagccggtttgaatctgggcggtgcgaaaaccgtgattatcggggatccccgcaaagacaaatctgaagcaatgtttcgggcgctgggccgatacatacagggactaaatggtcgctatatcaccgctgaagatgtaggaactaccgtggatgatatggacataattcacgaagaaacggacttcgtcacgggcattagccctagttttggtagctccgggaacccgtctccggttaccgcctatggcgtgtaccgtggcatgaaggcagcagcgaaagaggcctttggtacagacaacctggaggggaaagtgatcgcggttcaaggggtaggtaatgtggcgtatcatctgtgcaaacacttacatgccgagggcgccaagctgattgtcacggatatcaacaaagaagcggtacagcgtgcagtcgaagaatttggcgcttccgccgttgagccgaatgaaatctacggcgtggaatgcgatatttacgcgccgtgtgctcttggtgcgacagtcaacgatgaaacgatccctcagctgaaagcaaaggtaattgcgggttcggctaataaccagttaaaagaagacagacatggagacataattcacgagatgggtattgtttatgcaccagattatgtaatcaatgcgggcggcgttattaacgtcgcagatgaactgtatggctacaaccgcgaacgcgccctcaaacgtgtggagtcaatttatgacaccattgccaaagtgatcgaaatcagcaagcgcgatggaatcgccacttatgtggctgccgatcgtctggcggaagaacgcattgcaagtctcaaaaatagccgttccacctaccttcgcaatggccatgatattataagtcggcgttga

SEQ ID NO: 29 - protein, 548 aa, Lactococcus lactis
MYTVGDYLLDRLHELGIEEIFGVPGDYNLQFLDQIISHKDMKWVGNANELNASYMADGYARTKKAAAFLTTFGVGELSAVNGLAGSYAENLPVVEIVGSPTSKVQNEGKFVHHTLADGDFKHFMKMHEPVTAARTLLTAENATVEIDRVLSALLKERKPVYINLPVDVAAAKAEKPSLPLKKENSTSNTSDQEILNKIQESLKNAKKPIVITGHEIISFGLEKTVTQFISKTKLPITTLNFGKSSVDEALPSFLGIYNGTLSEPNLKEFVESADFILMLGVKLTDSSTGAFTHHLNENKMISLNIDEGKIFNERIQNFDFESLISSLLDLSEIEYKGKYIDKKQEDFVPSNALLSQDRLWQAVENLTQSNETIVAEQGTSFFGASSIFLKSKSHFIGQPLWGSIGYTFPAALGSQIADKESRHLLFIGDGSLQLTVQELGLAIREKINPICFIINNDGYTVEREIHGPNQSYNDIPMWNYSKLPESFGATEDRVVSKIVRTENEFVSVMKEAQADPNRMYWIELILAKEGAPKVLKKMGKLFAEQNKS

SEQ ID NO: 30 - DNA, 1647 bp, Artificial Sequence
  Synthetic polynucleotide
atgtacacagtcggtgattatcttttagaccgactgcacgaactcggaatcgaggaaatttttggcgtgcccggggattataacttgcagttcctggaccaaataatttcccataaggatatgaaatgggtaggcaatgctaacgaactgaatgcgtcttacatggccgatggttatgcacggaccaaaaaagcggcagcctttctgacgactttcggcgttggtgagttaagcgcggtgaacggcctggcggggtcatacgccgaaaatctaccagttgtcgaaatcgtgggctcgccgaccagcaaagttcagaacgagggtaagtttgtgcatcacacccttgctgacggagattttaaacatttcatgaaaatgcacgaacctgtaacggcagcgcgcacactgttgactgcggagaacgccaccgtcgaaattgatcgcgtcctgagtgctcttctgaaggaacgtaaaccggtgtatatcaatctcccggttgacgtggcggcagctaaagccgaaaaaccgagtttgcccttaaagaaagagaatagcacgtctaacacgtctgaccaagaaattctgaacaaaattcaggaatccctcaaaaatgcgaaaaaacctatcgtcatcaccggtcatgaaataatttcatttggactggagaaaaccgttacacagttcatctcaaagacgaaactgccaattaccaccctaaattttggcaaatcgtccgtagacgaagccctgccgagcttcttggggatctataacggcactttaagcgaaccgaatttaaaggaatttgtggagagcgccgatttcattctcatgctgggtgttaagctgacagattccagtacgggcgcgttcactcatcacctgaacgagaacaaaatgatctcgttgaacattgatgaaggaaaaatatttaatgaacgtattcaaaacttcgattttgaatcgctgatttcttccctactggacctcagcgagatcgaatacaaaggtaaatatattgataaaaaacaggaagactttgtgccgagtaacgcactgttgtctcaggatcgcctgtggcaagctgtggaaaatctgacccagagtaacgaaacgattgtcgcggaacaggggacctctttctttggtgcttcgtcaatctttttaaagtcaaaatcacattttattggccaaccactttggggtagtatcggctacactttccctgcggcactgggtagtcagattgccgataaagagtcgcgtcaccttttgtttattggggatggctcgctacaattgaccgttcaggagttaggtcttgctatacgcgaaaaaatcaatccgatctgtttcattatcaataatgacggctataccgtggagcgcgaaatccatggtccgaatcagagctataacgatataccgatgtggaattacagcaaactccccgagagctttggcgcaacagaagatagggttgtctccaagatcgtgcgtacggaaaacgaatttgtaagtgtaatgaaagaagcgcaagcggaccctaatcgaatgtactggattgaacttattctggcaaaagaaggggcccctaaagtcctcaagaaaatggggaagttgttcgccgaacaaaacaaaagctga

SEQ ID NO: 31 - protein, 348 aa, Saccharomyces cerevisiae
MSIPETQKAIIFYESNGKLEHKDIPVPKPKPNELLINVKYSGVCHTDLHAWHGDWPLPTKLPLVGGHEGAGVVVGMGENVKGWKIGDYAGIKWLNGSCMACEYCELGNESNCPHADLSGYTHDGSFQEYATADAVQAAHIPQGTDLAEVAPILCAGITVYKALKSANLRAGHWAAISGAAGGLGSLAVQYAKAMGYRVLGIDGGPGKEELFTSLGGEVFIDFTKEKDIVSAVVKATNGGAHGIINVSVSEAAIEASTRYCRANGTVVLVGLPAGAKCSSDVFNHVVKSISIVGSYVGNRADTREALDFFARGLVKSPIKVVGLSSLPEIYEKMEKGQIAGRYVVDTSK

SEQ ID NO: 32 - DNA, 1047 bp, Artificial Sequence
  Synthetic polynucleotide
atgtcgatcccagaaactcagaaggctattatattttatgagtcaaacggcaaactcgaacataaagacattcccgtgcctaaaccgaaaccgaatgaacttctgattaacgtaaagtacagcggagtctgccacacggatttgcatgcctggcacggggattggccgttaccgaccaaactgcctctggtgggtggtcatgagggcgcgggcgttgttgtgggtatgggagaaaatgtcaaaggctggaaaatcggcgactatgcagggatcaagtggctgaacgggtcttgtatggcgtgcgagtactgtgaattaggtaatgaatccaactgcccacacgcagatctgagtggttatacccatgacggcagcttccaagaatacgccacagcggatgccgtgcaggcagctcacattccgcaaggaactgatcttgcggaagtagccccaattctgtgcgcgggcatcacggtatataaagctctcaaaagtgcaaacttgcgcgccggtcattgggctgcgatttcgggtgccgcgggcgggctgggatcattagctgttcagtacgcgaaggcaatgggttatcgagttctgggcatcgacggcgggcccggtaaagaagagctatttaccagcctcggcggtgaggtcttcatcgattttaccaaagaaaaagatatcgtgtccgcagtcgtgaaagcaaccaatggcggcgctcacggaattataaatgtgtctgtatcagaagcggcgattgaagccagcacgcgttattgtcgcgcgaacggcacagtggttctggtaggcctgcccgccggtgcgaaatgtagctcggacgtgttcaatcatgtggtgaagagtatttccattgttggatcttacgtagggaaccgtgcggatacgcgggaggcactggatttttttgcaaggggcttggttaaaagcccgatcaaagtcgtgggtctgtcgtctctacctgaaatatatgagaaaatggaaaagggacagatcgccggacgctacgtcgtcgacacctcaaagtga

SEQ ID NO: 33-34 - skipped (2 entries)

SEQ ID NO: 35 - protein, 439 aa, Escherichia coli
MTHQLRSRDIIALGFMTFALFVGAGNIIFPPMVGLQAGEHVWTAAFGFLITAVGLPVLTVVALAKVGGGVDSLSTPIGKVAGVLLATVCYLAVGPLFATPRTATVSFEVGIAPLTGDSALPLFIYSLVYFAIVILVSLYPGKLLDTVGNFLAPLKIIALVILSVAAIIWPAGSISTATEAYQNAAFSNGFVNGYLTMDTLGAMVFGIVIVNAARSRGVTEARLLTRYTVWAGLMAGVGLTLLYLALFRLGSDSASLVDQSANGAAILHAYVQHTFGGGGSFLLAALIFIACLVTAVGLTCACAEFFAQYVPLSYRTLVFILGGFSMVVSNLGLSQLIQISVPVLTAIYPPCIALVVLSFTRSWWHNSSRVIAPPMFISLLFGILDGIKASAFSDILPSWAQRLPLAEQGLAWLMPTVVMVVLAIIWDRAAGRQVTSSAH

SEQ ID NO: 36 - DNA, 1320 bp, Artificial Sequence
  Synthetic polynucleotide
atgacccatcaattaagatcgcgcgatatcatcgctctgggctttatgacatttgcgttgttcgtcggcgcaggtaacattattttccctccaatggtcggcttgcaggcaggcgaacacgtctggactgcggcattcggcttcctcattactgccgttggcctaccggtattaacggtagtggcgctggcaaaagttggcggcggtgttgacagtctcagcacgccaattggtaaagtcgctggcgtactgctggcaacagtttgttacctggcggtggggccgctttttgctacgccgcgtacagctaccgtttcttttgaagtgggcattgcgccgctgacgggtgattccgcgctgccgctgtttatttacagcctggtctatttcgctatcgttattctggtttcgctctatccgggcaagctgctggataccgtgggcaacttccttgcgccgctgaaaattatcgcgctggtcatcctgtctgttgccgcaattatctggccggcgggttctatcagtacggcgactgaggcttatcaaaacgctgcgttttctaacggcttcgtcaacggctatctgaccatggatacgctgggcgcaatggtgtttggtatcgttattgttaacgcggcgcgttctcgtggcgttaccgaagcgcgtctgctgacccgttataccgtctgggctggcctgatggcgggtgttggtctgactctgctgtacctggcgctgttccgtctgggttcagacagcgcgtcgctggtcgatcagtctgcaaacggtgcggcgatcctgcatgcttacgttcagcatacctttggcggcggcggtagcttcctgctggcggcgttaatcttcatcgcctgcctggtcacggcggttggcctgacctgtgcttgtgcagaattcttcgcccagtacgtaccgctctcttatcgtacgctggtgtttatcctcggcggcttctcgatggtggtgtctaacctcggcttgagccagctgattcagatctctgtaccggtgctgaccgccatttatccgccgtgtatcgcactggttgtattaagttttacacgctcatggtggcataattcgtcccgcgtgattgctccgccgatgtttatcagcctgctttttggtattctcgacgggatcaaggcatctgcattcagcgatatcttaccgtcctgggcgcagcgtttaccgctggccgaacaaggtctggcgtggttaatgccaacagtggtgatggtggttctggccattatctgggatcgtgcggcaggtcgtcaggtgacctccagcgctcactaa

SEQ ID NO: 37 - DNA, 1101 bp, Artificial Sequence; identical to SEQ ID NO: 28
  Synthetic polynucleotide

SEQ ID NO: 38 - DNA, 1080 bp, Artificial Sequence; identical to SEQ ID NO: 1
  Synthetic polynucleotide

SEQ ID NO: 39 - DNA, 1038 bp, Artificial Sequence
  Synthetic polynucleotide
atggcagtgttcaaccgtgttgagtttgataatcatgaacaagtagtcttctgtagcgaccaggaatcgggtctgaaggccatcattgctgtgcactctacgaaattagggccggcggttggcggttgccgcttgtgggactatgtatctgatgaagatgctgtttacgacgttcttcgtctatccaaaggcatgacttacaaaaacgcagtcgctcgcctcccttttggtggcggcaaaagcgtcatcattggtaacgccaaagaaatcaagtcagaggcgctgttccgtgctttcggacggaaactggaaggtctgggcggcgcgtattacagcgcagaagacgtgaatatcacctgcgctgatgttgcaataatgaacaaagagaccaactacgtactgggactggaaggtaagtctgggaacccatccccgtttactgctctgggcaccttcctgggtatcaaagcagcgtaccagcaccagcatggccaccaggacctggccggtgtgaaggttgctgtgcaaggtttgggggctgtagcttattctctgtgcaaatacctctatgaggccggtgcgagtctttacgttactgacattaatcaggcatccattgatcgagtcgtaaacgatttcaacgctacggccgttggcatcgacgaaatctacgatttagacgttgatgtttatagcccgtgcgctctgggcgcaaccgtgaacgacaacacaatcgcgcgtctgaaagcgactatcattgctggttgtgctaacaatcagctggcagaatctcgtcacggcgaactgctgcgccagaaaggcatcctatacgcgcccgattatgttataaacgctggcggcatcatcaatgtgtactatgaaactgcgccgggtggttacagtgcacaggcctcgaccaagcatgttgagggaatttttggtactctgtctgaaattttcgctcgctccgtcaccgagcaaaaatcaactcacctgatcgcagacgaactggctcaggaaatcattgccaacggcctg

SEQ ID NO: 40 - DNA, 1098 bp, Artificial Sequence
  Synthetic polynucleotide
atggagatcaaggaattggaaaaagtagaacaggccggaattttcggcaaacttagccaactgggtcacgaacaggtcgttttttgccatgacgaggctacgggcttaaaagcgatcattgctatccacaacactgtgctgggtccggcactgggcggtacccgtatgtggaattacgcaactgaacaggaagctctgaccgatgttctacgcctgtcacgtggcatgacattcaaagcgtcgatctctggtctgaacctgggtgggggcaaggccgtgatcattggagacgcgaaaaccatgaaaactgaggcttttatgcgtagattcggtaaattcgtagattctctcaacggcaagtatataaccgcggaagacgttaacatgaaaactgctgatatggaatacattggtatggaaacgaagcatgtcaccggcctgccagaatccatgcgtggcggtggcgaccccagcccggtgactgcatatggggtttaccttgggatgaaagctgccgctaaaaaaacctacggtaatgatagtctgactggcaaaactatcgcagttcaaggtatcggtcaggtaggtacgtatcttacagagtacctggtgaaggagaacgcgaacgtttacatcaccgatattgcagaagacaaagtaaaagctctggcgcagcgcctgggagttaaaaccgttgctcaggataagatctatgacctggatatggacatctacgccccttgtgctctgggcgccacactgaatgacgataccatcccgcgcctgaactgccaagtcgtggcaggtgcggcaaacaaccagctgaaagatgaatctaagcacggctacatgctaatagacaaaggcattacctatgctccggactttttgatcaatgcgggtggtttaatcaacgtatataacgaatttctgggcaactacaatcgtgcccgcgtattcgaacaggctgaaggtatttacactacttgtatgaacatcttcaaactggccgctcaggagaaaatcaacactcaggaggcagcgattaaattagcagaaaaacgtatcgctgacattgcacaagttcgtacgcgacgc

SEQ ID NO: 41 - DNA, 1089 bp, Artificial Sequence; identical to SEQ ID NO: 3
  Synthetic polynucleotide

SEQ ID NO: 42 - DNA, 1047 bp, Artificial Sequence
  Synthetic polynucleotide
atgaacgtgttctcggatattgcgtttgacgaccatgagcaagtagttttcgccagcgataagaccacgggtctgaaaactatcatcgctgtgcacaatacaaacttagggccgtccttgggcggttgccgcatgtggccctatgcatctgaacaggatgctattcacgacgttcttcgtctatcacggggcatgacttacaaatctgcactggctaacctcccactgggtggcggcaaaagcgtcatcatcggtgaccctcgttcccagaaaaccccggaactgttccgcgcgatgggacgtgcggttgaacagctgggtggcagatacatagtggctgaggatgtaggtacttctccggaagatatgggccacattgctagtcagaccaagcatgtcggaggcatcaacgacggtaaagacccggaacgtaccggtgatcctagtccgtttacggcatatggcgttttcatcgggctgaaagaagctgttcgttttaaacacggtagcgacgacctgactgggatgcgcgtcgcggtacagggtctgggtcatgttggctaccacctctgtcgtatgctgcatgccgcaggcgctaagctgattgtagcagatcttaatgcggcctccatgaaagcggctgctatggagttcggcgcgaccgcagtaccggttgataaaatcctgtctgttgacgcagacattctggccccatgcgcgctgggtggcgtgatcaacgataaaactatcgaagagctgaaagtcggcgttatcgctggcgcagctaacaatcaactggaagatgaccgccacggggaaatgctgcgtgaagccggtattttgtacgcgccggattacgtgatcaacgctggaggtgttattgaagtgtattactgccgtgagggcaagaccgtagctgagactaacatgcacattgaaggtatcggggaaactgttcgcgaaatctttgaacgcgcgaaacagcaaaacttatccaccggtttcgtggctgataggttggctgaagaacggttcggtctgaaaaag

SEQ ID NO: 43 - DNA, 1047 bp, Artificial Sequence
  Synthetic polynucleotide
atgttcgcgctgcttgaagagcacgaacatgaacaagtgtctctggtctacgagccgagcagtggttatcgtgggatcattgccatccacgacacaactctgggccctgcactcggcggtacccgcttttggaattacctgaacgatcgtgaagctttaatcgattgtctgcgattggctcgcggtatgacgtataaagcagctgttgcgggcctgaacctaggcggtggaaagtcagttataattggtgacaacaaaatccgtaatcgcgaaccaatcttcagggcacatggccgtcacgtaaaagctctgggcggtcgttacatcactgcggaggacgtaggcacctctgttggtgatatggaatttattaaggccgaaactgaccacgtgaccggactgatcggtaaatccggcgatccgagcccggttaccgctttcggtgtctaccgtgggattaaagcatgcgcaaaacaccgctatggcgatgccgaactgcgtggtaaaaaggtggcgatccaggggtgcggccatgtgggttactatctggctgaactgctctacaaagaaggcgctgaccttattgttactgacatcgactccgctaaagtagagcgcgttgtaaaagcgttcgaagcgaaggctgtggccactgatgacatctacggtgtacccgcttctgtttttgccccatgcgcgctgggtggcatcattaacgaccagaccattgcgcagctggaagttgatatcgttgcaggcggtgccaacaaccagttagctgaggaacgtcatggtgatatgctggaggaacgtgggattacgtacgctccggattatgtcatcaatgcgggcggtctggtgaacgtgaacgcggaattggaaggttggacgatggaacgtgcacggaacaaagcaggcgagatctatgacacattactgatgttgttcgaaattgctggcgaagagggtatcccgagctaccgcgctgctgatcgcctggccgaacggcgtatcgcggctattgctaaagtacggcaaaattttgtc

SEQ ID NO: 44 - DNA, 1092 bp, Artificial Sequence
  Synthetic polynucleotide
atggagatcttcacatatatggaaaagtacgactacgaacaactggtcttttgtcaggataaatccagcggtctcaaagccattatcgctatacacgatacgactttagggccggcgttgggcggtacccgcatgtggacctataactctgaagaggaagcaattgaagacgctcttcgtctggcaaaaggcatgacttacaaaaatgctgcggctggtctgaacctgggcggcggtaaaaccgtaatcatcggtgaccctaagaaagataaaaacccggaaatgttccgtgcatttgggcggtacattcagggcctgaacggccgatatatcaccgcggaggacgtgggtactactgttcaggatatggacctgatccatatggaaacagatttcgttaccggaatcagcgctgaagccggatcgtctggtaatccctccccagtaaccgcttacggcgtttacaagggcatgaaagccgcagcaaaagaggccttcaacgacgatagtctggaaggtaaaacgattgcggtccagggtgtgggtaacgttgcttatgctctgtgcgaatacctacacaaggaaggtgcaaaactcgtggttactgacatcaacaaaggtgcggtagagcgcgctgtggaagctttcaacgctactgcggtagacccggatgatatttacgacgttgattgcgacatctacgctccgtgcgccctgggggccaccattaacgatgatactatccctcgtatcaaggcaaaagtcatagctggctctgcgaacaatcaacttaaaagctccgaacacggcgatatcatttttgagaaaggcatcatctatgccccggactacgttatcaacagtgggggtgtgattaatgtcgctgacgagctggttggttacaacgaagaacgtgcactgaaaaaagtggaaactatttatgatagcttgcagaaagtttttgagatctctcgcagggaccatatcccatcttatgttgcagcggaccgtatggcggaagaacgtattgaggcggaacgtaattcgcgctcccagttcctgttaaacggccatcacatcttaagcagacgc

SEQ ID NO: 45 - DNA, 1095 bp, Artificial Sequence
  Synthetic polynucleotide
atggagctgttcacatatatggaaaagtacgactacgaacaactcgtgttttgccaggataaaaattcaggcttgaaagcaattatagccattcacgacaccactcttggtccagcgttagggggcacccggatgtggacgtatgattctgaagaggatgctatcgaagacgctctgcgtctggcaaaaggtatgacttacaaaaacgctgccgcgggtctgaacctgggcggcggtaaaaccgttatcatcggagaccccctgaaggataaaaacgaagaaatgttccgagctttcggtcgttacatccagggcctggcgggacgctatatcactgccgaagacgtaggtaccactgtcaaagatatggacctgattcatgaggagacggattacgttaccggtatcagccctgcttttggctcctctggcaacccgagcccggttactgcatacggcgtgtatcgtggtattaaggctgcggcaaatgaagcgtacgggtccgactcgctggaaggtaaaactatcgctgtacagggtgtaggcaacgttgctttcaccctatgtagacacttacatgaagaaggtgctaagctgatcgtcactgacattaacaaagagtctgttcagcgcgcggtggatgaatttggcgcaaaagccgttgaaccgaacgaaatctacggtgtcgactgcgatattttcgctccgtgtgcccttggcgctatcatcaatgataacaccctggaagtgctgaaagcagatgttatcgccggtgcggcaaacaaccaactgaaggaaacacgccacggtgatattctgcacgaacgtggcatagtgtatgcgccggactacgttatcaacgcaggcggtgtaatcaacgtcgctgatgagctttatgggtacaatcgtgagcgtgcgatgaaaaatgtagaaaaagtttatgacaacgtagcacgtgtttttgaaattgctaaacgcgatggtgtgcctagttacctggcggcggaccgtatggcagaagaacgtatagcttctatggcaaaaagccgctctcagttcctgaggtccgagcataacatcttaagccgccgtagc

SEQ ID NO: 46 - DNA, 1098 bp, Artificial Sequence
  Synthetic polynucleotide
atggagatcttcaagtatatggaaacctacgactacgaacaaatggtcatttgtcaggataaacagagtggtctgaaagccatcatcgttatacacgatacgactttagggccggcattgggcggtacccgcatgtggacttataaatctgaagaggacgcgcttgaagacgctctccgtctggctcggggcatgacatacaaaaatgcagctgcgggtctgaacctgggcggcggtaaaaccgtaattatcggtgatcctaagaaagacaaaaacgaagaaatgtttcgtgccttcgggcgctacattcagggcctgaacggcagatatatcaccgctgaggatgtgggtactactgtagaagatatggacatcatttaccaagaaacaccatttgttaccggagtgagccccgcattcggatcatccggtaacccgtctccagttaccgcttacggcgtttatcgtggcatgaaggcagcggctaatgaggccttcggtactgacagcctggaaggtaaaatcatcgcggttcagggtgtgggtcatgttgcttacaacctgtgccgtcacctgcatgaagaaggcgcaaagcttatcgtaactgatattaacaaagaagcggtcgaccgcgttgtgggcgaatttggtgctacggcggtagatccggatgaaatttacggcgttgaatgcgacatattcgcaccgtgtgctctgggtgccatcatcaatgatcagaccattggacagatcaaagctaaagtgattgcaggtgcggcaaacaaccaattacgtgagactcgccacggcgacgctatccacgaaatgggcatcgtctatgctccggactatgtaatcaacgcgggtggggtcattaacgttgcggacgagctgaatggctacaaccgtgatcgtgcgatgaaaaaggtggaaaccatctacgacaacattgctaaagttatcgaaatctccaagcgcgatcatattcctacttatctggccgcagatcgtctggctgaagaacgcatagagcgtatgcgtaactcgcgttctcagttcttactgaacgaacgccacattctgagctcgaggacccga

SEQ ID NO: 47 - DNA, 1095 bp, Artificial Sequence
  Synthetic polynucleotide
atggagctgttcaagtatatggaaacctacgactacgaacaagtggtcgtatgtcaggataaacagagtggtctcaaagccatcattgctatacacgatacgactttagggccggcgttgggcggtacccgcatgtggacttataacactgaagcagaagcttttgaggacgcacttcgtctggctaaaggcatgacctacaaaaatgcggctgccggtctgaacctgggcggtggcaagacagttatcatcggagaccctcgtaaagataaaaacgaagagatgttcagagcattcggtcggtacattcagggcctgaatggccgttacatcactgccgaagacgttggtaccaccgtaggcgatatggacatcattcatgaagaaactgactatgttaccggtatttctcccgcttttggtagctcaggcaacccgtccccggtgactgcgtatggtgtatacgttggcatgaaagcggcagctaaagaagcgttcgggaccgattctctggaaggcttgacggtcgctgttcaaggtgtgggcaacgtctcgtacaccctgtgcaagcacttacatgaggaaggtgctaagctgatcgttactgacatcaacaaagagtctgttgcgcgcgcagtagaggattttggtgcaaaatccgttgatatcagcgatatctactcagtggagtgcgacattttcgctccatgtgctctaggagctatcatcaatgacgacactatcccacagctgaaagcaaaagttattgccggtgcggccaacaaccagctgaaggaaacaaaacacggtgatcagataagcgaactgggcatcgtgtatgcgccggattacgttatcaacgcaggcggtgtgatcaacgtagccgatgaactctatgggtacaataaagaacgtgcgcttaaacgtgtagaaacgatttatgatagcatctccaaaatttttgaaatttctaaacgcgacaacatccctacttacatggcggcagaccgtatggccgaagaacgtatagaaaacatgcgcaaatcgcgtaaacagttcctgacgaacgagcattctatcttaagccgccgccga

SEQ ID NO: 48 - DNA, 1074 bp, Artificial Sequence
  Synthetic polynucleotide
atgatgagcatcgacattttgaagaaaactgagacatcgatcccggtccaggatgacttcctggattacgctctggcacatggctttggtgacctccacttcaaagttgatccagaaaccgggatgaaagcgattgtagccatccactctacgaagcttggccctgctctgggtggttgtcgttttatagaatatcccaatactgcatccgctatcaacgatgcgatgcgcctggcccgtggcatgtcattcaaagcagcttctgttaacctgccgctgggcggaggtaaagcggtgatcattaaaccgaacaaaccgttcgacagggaagcatacctgcatgcttttggtcgctttgtgaacgatttaggcggacgttatatcaccgcgctggacagcggcacccaactgtccgacatggacatcattggtcagcacacttcttacgtagctagcctatcaagtcacaatggcgatccatccccgtctaccgctaagggtgttctgcgagggatccaggcagcggtcgagttcaaacttggcaaagataacctgaacggtctgcatattgcaatccagggtctcggtcacgttggttacctgttagccagccaccttcatgctctgggcgccaaactgactgttacggacgttaatccgcgcgcggtgcagcgtgctgtagaagaatttggcgcaacagctgtgtccactgatatgattcaccgtgtgccttgcgatgttttcgcgccctgcgccctcggcgcggttatcaacgacatcaccatctctcaactgcaaaccactattatagctggagcagctaacaaccagctggctcatacctatcacggcccgatcctgcatgagaagggtatcttgtacgcggcagactatgtaatcaacgccggtggtctggtcttcgcggcgtctaaatacttcaacactcctcaggatcaggtaaatcagcaaatcgacggcattggtacttcgctgctggaaatctttattcggtcccagaaagaaaaccgcccggcttctgagatcgctgatacgctggctcaggaaaaactggct

SEQ ID NO: 49 - DNA, 1098 bp, Artificial Sequence
  Synthetic polynucleotide
atgacactggagatctttgaataccttgaaaagtatgactacgagcaagtagtcttctgccaggataaagaaagtggcttgaaagcaattatagccatccacgacactacgctgggtcctgctttaaccgggactcgcatgtggacctatgatagcgaagaagctgcgatcgaagatgctctacgtctggcgaaaggtatgacttacaaaaatgcagctgccggcctcaacctgggtggcgcgaagaccgttattatcggtgacccccgaaaagacaaatccgaggcaatgttccgtgcgctgggacgctacattcagggcctgaacggtagatacatcaccgctgaagatgtgggtacgactgttgatgacatggacattatccatgaagaaaccgacttcgtgactgggatctcaccaagctttggctcttctggtaacccgtccccggttacggcatatggcgtataccgcggcatgaaagctgctgcgaaagaggccttcggtaccgataacctggaaggaaaggtaattgcggttcagggtgtcggtaatgtggcttatcacctctgtaaacatctgcacgctgaaggcgctaagctgattgttactgatatcaacaaagaggcagtccaaagggccgttgaggaatttggcgcgtcggcagtagaaccgaatgaaatctacggtgttgaatgcgacatttacgccccgtgtgcgctgggcgccacagtcaacgatgaaactatccctcagctgaaagctaaggttatcgctggaagcgccaacaaccagctgaaagaagaccgtcatggggatatcatacacgagatgggtatcgtgtatgcgccggattacgtgatcaacgcagggggtgttattaatgtggcggacgaattatacggctataaccgtgaacgcgctttgaaacgggttgaatctatttacgatactatcgcaaaagtaatcgaaatcagcaaacgtgatggtattgctacctacgtcgcagctgaccgcttggctgaagagcggatcgcatctttaaagaactcccgtagcacctatctgcgcaacggccacgatatcatatcgcgacgt

SEQ ID NO: 50 - DNA, 1098 bp, Artificial Sequence
  Synthetic polynucleotide
atgaacgtgttctcgcatcctgagtttgataatcacgaacaagtatccttcgttagcgacccggaaacgggtctgcgcgccatcattgctatacacaacacatctcgtgggccggcgttaggcggttgccggatgtttccatatgcatctgacgaagaagctttgcgtgatgttcttcgtctatcacgcggcatgacttacaaaagtgcactggctaacctcgacctgggtggcggcaagagcgtcatcatcggtgatccccgtcagcataaaaccgaggcgatgctggaagccatgggacgctgtctggagaaactgggtggccactacattgcggctgaagactccggtacttctgtggcagatctgcaagttatggctcgtcacacccggcacgtagcgggcatcactagccgtccgggattcgatggtgctccatctgacggcgatccgtcaccggtcaccgcatacggcgttttcgttggtctgaaagccgccgtgcagcatgggctgggtcgcacggacctgactgggcttaaggtcgctattcagggcatcggtaatgttggctatcgtctggctcgccacctgaaagacgcaggtgccgaactctgggtttacgatatccatcaggagcagatggaccgtgctgtagcggaactgggcgcgacccctgctaccgcagaagaaatcctgctgttaccggtagatgtggtggctccgtgcgcgatgggtgctattttgaacgatgagtccattccgaaattgcaggctagagtaatcgcaggtgctgcaaacaaccagctggccgaagctcgccacgatcgtgcactgcaacagcgtggaatcctctacgcgccggactttgtgctgaatgccggtgggataatcgacgttgcacacgaacgcactgatcaggatcctacaaaggttcgtgcccatgtggacgctattgcggataccctaggcgaaatcttcactcgttctcaacgtgaccagcgcccgaccggcgagattgctgatgaactggcggaagaacgtttccgacgcgctccgcgtcgtagcacagccactgctaacaaagtagcaagcgttggc

SEQ ID NO: 51 - DNA, 1089 bp, Artificial Sequence; identical to SEQ ID NO: 5
  Synthetic polynucleotide

SEQ ID NO: 52 - DNA, 1098 bp, Artificial Sequence
  Synthetic polynucleotide
atgacactggagatctttgaataccttgaaaagtatgactacgagcaagtagtcttctgccaggataaagaaagtggcttgaaagcaattatagccatccacgacactacgctgggtcctgctttagggggcactcgcatgtggacctatgatagcgaagaagctgcgatcgaagatgctctacgtctggcgaaaggtatgacctacaaaaatgcagctgccggtctcaacctgggcggtgcgaagactgttattatcggcgacccccgaaaagacaaatccgaggcaatgttccgtgcgctgggacgctacattcagggtctgaacggcagatacatcaccgctgtggatgttggtacaaccgttgatgacatggacattatccatgaagaaactgacttcgtgaccgggatctcaccaagctttggctcttctggtaacccgtccccggtcacggcatatggcgtataccgcggcatgaaagctgctgcgaaagaagccttcggtactgataacctggaggggaaggttattgcggttcagggtgtgggtaatgtagcttatcacctctgtaaacatctgcacgctgaaggcgctaagctgattgtcaccgatatcaacaaagaagcagttcaaagggccgttgaggaatttggtgcgtcggcagtagagccgaatgaaatctacggcgttgaatgcgacatttacgccccgtgtgcgctgggtgccacggtaaacgatgaaactatccctcagctgaaagctaaggttatcgctggcagcgccaacaaccagctgaaagaagaccgtcatggagatatcatacacgaaatgggtatcgtgtatgcgccggattacgtgatcaacgcagggggcgttattaatgtggcggacgagttatacggctataaccgtgaacgcgctttgaaacgggttgaatctatttacgatactatcgcaaaagtaatcgaaatcagcaaacgtgatggtattgctacctacgtcgcagctgaccgcttggctgaagagcggatcgcatctttaaagaactcccgtagcacctatctgcgcaacggccacgatatcatatcgcgacgt

SEQ ID NO: 53 - DNA, 1098 bp, Artificial Sequence; identical to SEQ ID NO: 7
  Synthetic polynucleotide

SEQ ID NO: 54 - DNA, 1038 bp, Artificial Sequence
  Synthetic polynucleotide
atgtcggtgttctcacatcctgagtttgatggccacgaacacgtagccttctatcacgacaggaaaagcggtctgaaggcaatcattgctatacataatacgaacttagggccggcgttgggtggttgccgcatgtggccatacgcaactgacgaagaagctcttcgtgatgttctccgtctgtctaaaggcatgacctacaaatccgctgtcgcgaacatcaaactgggcggcggtaaagcggttatcctgggtaaccatcgtactgagaagacccgcgacctgctgctggctatgggggatttcgtcgaatctctgggcggccggtatattacagcagaagacagcggtacttctgtggcagatatgaaagtaatcggtgaacgtacccgctttgccggaggcgttgtggaaggttccgagcacggcggtgacccctccccgaccaccgcttacggaacttacgttggcctgaaggctgccgcaaaattccgtctcggtgttgatagcctgaaaggtatcagagtagcggttcagggcgtgggtaacgttggctatcgtctggctaaacacctacacgacgatggtgcagagttggtggtttctgacattttttcagaaaacaccgaacgcgctgtgcgtgaactgggcgctcgtgtagtagagggcgacgccattttcgatcaagatgttgacatcttcgctccgtgtgcgctgggggccatcatcaacgataatactattgatcgcttgaaggcatgcgtcgtagctggcgctgcgaacaaccagcttgctgaagaacgtcacggtgaactgctccgagcgcgtgaaatcctatacgccccggactacgttataaacgcgggtggtatcgtggacgtctattaccagcgcaccggcgaaagcgctgataaactgaaagcccatgttgagggtattggtgacacactgactgaaatcttcacgcgcgctgctgaaaatcaacagccgacgggcctggtggctaataaaatcgcggaggaacgttttaaccgtgcc

SEQ ID NO: 55 - DNA, 1098 bp, Artificial Sequence
  Synthetic polynucleotide
atgacactggagatctttgaataccttgaaaagtatgactacgagcaagtagtcttctgccaggataaagaaagtggcttgaaagcaattatagccatccacgacactacgctgggtcctgctttagggggcactcgcatgtggacctatgatagcgaagaagctgcgatcgaagatgctctacgtctggcgaaaggtatgacctacaaaaatgcagctgccggtttcaacctgggcggtgcgaagactgttattatcggcgacccccgaaaagacaaatccgaggcaatgtttcgtgcgctgggacgctacattcagggtctgaacggcagatacatcaccgctgaagatgtgggtacaaccgttgatgacatggacattatccatgaagaaactgacttcgtgaccgggatctcaccaagcttcggctcttctggtaacccgtccccggttacggcatatggcgtataccgcggcatgaaagctgctgcgaaagaggcctttggtactgataacctcgaagggaaggtaattgcggttcagggtgtcggtaatgtggcttatcacctctgtaaacatctgcacgctgaaggcgctaagctgattgttaccgatatcaacaaagaggcagtccaaagggccgttgaggaatttggagcatcggcagtggaaccaaacgaaatctacggtgtagagtgcgatatctacgctccgtgcgccctgggcgcgactgttaatgatgaaaccatcccgcagctgaaagcgaaagtaattgcaggctccgccaacaaccagctaaaagaagaccgtcacggtgacatcattcatgaaatgggtatcgtttacgctccggactacgtgataaacgcgggcggtgttattaacgtggcagatgaactgtatggctataaccgtgagcgtgctctgaagcgtgttgaatctatatatgatactatcgctaaggtcatcgaaatcagcaaacgtgatggtatcgctacctacgtagctgccgaccgtctcgctgaagagcgcatcgcctctctgaaaaattctaggagcacttacctgcgtaacggtcacgacataatcagccgccgc

SEQ ID NO: 56 - DNA, 1098 bp, Artificial Sequence
  Synthetic polynucleotide
atgacactggagatctttgaataccttgaaaagtatgactacgagcaagtagtcttctgccaggataaagaaagtggcttgaaagcaattatagccatccacgacactacgctgggtcctgctttagggggcactcgcatgtggacctatgatagcgaagaagctgcgatcgaagatgctctacgtctggcgaaaggtatgacctacaaaaatgcagctgccggtctcaacctgggcggtgcgaagactgttattatcggcgacccccgaaaagacaaatccgaggcaatgttccgtgcgctgggacgctacattcagggtctgaacggcagatacatcaccgctgaagatgtgggtacaaccgttgatgacatggacattatccatgaagaaactgacttcgtgcgtgggatctcaccaagctttggctcttctggtaacccgtccccggttacggcatatggcgtataccgcggcatgaaagctgctgcgaaagaggccttcggtaccgataacctggaagggaaggtaattgcggttcagggtgtcggtaatgtggcttatcacctctgtaaacatctgcacgctgaaggcgctaagctgattgttactgatatcaacaaagaggcagtccaaagggccgttgaggaatttggtgcgtcggcagtagaaccgaatgaaatctacggcgttgaatgcgacatttacgccccgtgtgcgctgggtgccacggtcaacgatgaaactatccctcagctgaaagctaaggttatcgctggcagcgccaacaaccagctgaaagaagaccgtcatggagatatcatacacgagatgggtatcgtgtatgcgccggattacgtgatcaacgcagggggcgttattaatgtggcggacgaattatacggctataaccgtgaacgcgctttgaaacgggttgaatctatttacgatactatcgcaaaagtaatcgaaatcagcaaacgtgatggtattgctacctacgtcgcagctgaccgcttggctgaagagcggatcgcatctttaaagaactcccgtagcacctatctgcgcaacggccacgatatcatatcgaggcgt

SEQ ID NO: 57 - DNA, 1098 bp, Artificial Sequence
  Synthetic polynucleotide
atgacactggagatctttgaataccttgaaaagtatgactacgagcaagtagtcttctgccaggataaagaaagtggcttgaaagcaattatagccatccacgacactacgctgggtcctgctttagggggcactcgcatgtggacctatgatagcgaagaagctgcgatcgaagatgctctacgtctggcgaaaggtatgacctacaaaaatgcagctgccggtctcaacctgggcggtgcgaagactgttattatcggcgacccccgaaaagacaaatccgaggcaatgttccgtgcgctgggacgctacattcagggtctgaacggcagatacatcaccgctgaagatgtgggtacaaccgttgatgacatggacattatccatgaagaaactgacttcgtgaccgggatctcaccaagctttggctcttctggtaacccgtccccggttacggcatatggcgtataccgcggcatgaaagctgctgcgaaagaggccttcggtactgataacctggaagggaaggtaattgcggttcagggtgtcggtaatgtggcttatcacctctgtaaacatctgcacgctgaaggcgctaagctgattgttaccgatatcaacaaagaggcagtccaaagggccgttgaggaatttggtgcgtcggcagtagaaccgaatgaaatctacggcgttgaatgcgacatttacgccccgtgtgcgctgggtgccacggtcaacgatgaaactatccctcagctgaaagctaaggttatcgctggcagcgccaacaaccagctgaaagaagaccgtcatggagatatcatacacgagatgggtatcgtgtatgcgccggattacgtgatcaacgcagggggcgttattaatgtgtgcgacgaattatacggctataaccgtgaacgcgctttgaaacgggttgaatctatttacgatactatcgcaaaagtaatcgaaatcagcaaacgtgatggtattgctacctacgtcgcggctgaccgcttggctgaagagcggatcgcatctttaaagaactcccgtagcacctatctgcgcaacggccacgatatcatatcgcgacgt

SEQ ID NO: 58 - DNA, 1074 bp, Artificial Sequence
  Synthetic polynucleotide
atgtcgatcttctcacatcctgcgtacgataagcacgagcaagtggccttttgtcaggacgcaaaaagcggtctgaaagctattatcgctgtacacaatacgaacttagggccgtccttgggcggttgccgcatgtggccatatgcggatgacggcgaagcacttaacgacgttctccgtctgtctcggggtatgacttacaaatctgctatggctggcctgaaactgggcggtggcaaagcggtcattatcggtgatccccgtaaggaaaaaaccccggaactgctgcgcgccatgggggacttcatcaacaccctgggaggtagatatataacagcagaggatagcggtacttctgtagctgatatgcatatcattggcgaacgtacccagtacgttagtggcctgatcgctgaatccgagcacggtggcgacccatctcctagcactgcttacggagtttttgtgggtctgaaggccgcggttgaacaccgttggggcaaatccgacctgagcggtctaaaagtaagtttgcagggtgtgggtaacgttggcttccgtctggcaaaactgctcaaagatgccggcgcagaacttttcgtcactgacatctttcaagataacattgaccgcgctgtgtccgaactgggcgctaccgcggtatcagcagacgaaattttcgatctggatgttgacctgttcgctccgtgcgccctaggggctgtcctgaacgatgatactatcgcccgccttaaggttggtgcggtggctggcgctgcgaataaccagttgaccgagatgcgtcacgcagccgcgctcggagagaaaggtatcctctatgctccggactacgttataaacgcgggtggtatcatcgacgtatattaccagcagcagggcgattacgatccggcgagggttaaagcccatatagaaactattggctctacgatgcaagaaatctttcagcgtgctgctgaaaccggcgaaacaaccgcacacgttgctgatcgtatcgcggaagaacgtttcggccatgaagacgcctctaaaaatattgacccagctgcggct

SEQ ID NO: 59 - DNA, 1050 bp, Artificial Sequence
  Synthetic polynucleotide
atgccagtgttcacacatattgactttgatcaccacgagcaagtagttttcggtcacgaccaggccagtggcctgaaggcaatcatcgctgtgcatgatacgactttagggccggcgttgggtggttgccgcatgtggaactatgcatctgacgaagaagctcttcgtgatgttctccgtctgtcaagaggcatgacttacaaatcggctctggcgcgtctgcctctgggcggcggtaaagcggtcattatcggtgacccccgctctggaaaaagcgaagctctgttccaggccatgggggattttgttgacaaactgggcggtcggtacataaccgcagctgatagcggtaccggtgtagcggaaatgcagatcatggctcaacgtacccgccacgtagcaggcgccggacagcgtgaggcgttcgacggcggctctcgtgatggtaatccgagcccgtccactgcctatggcgtctttgttggtattcgcgctgcggtgcgtcataggctgggccgtgacgatctgaaaggcttaaaggttgctatccagggtgtgggcgaagttggtttctccctggctaaacacttgaaagacgcaggtgctgagctgtgggtcactgacatctttgaagccaaccagcgacgcgcggtagaacaattgggcgcacgcgctgttggccagcacgatatcttcggtctggacgttgatgtattcgctccgtgtgcccttggagctattgtcaacccgcagaccctggaagcgctgcgtgcacctattatcgctggtgcggcaaataaccagctggcatctccggaactcgctgaacaactgcaacgccgcggggtgctgtacgcaccagattacgcgatcaacgccggtggcataatcgacgtttgctacgaacgtacgggaggttctactgctgcgctgaaggctcatattgagggcatcgaggcaaccctagcggaaatctttcagagggcggctgctgagggcgctaccaccactgcaattgctgacagaatggcgcgtgaacgtctgggtcgt

SEQ ID NO: 60 - DNA, 1041 bp, Artificial Sequence
  Synthetic polynucleotide
atggcagtgttcaaccattctgagtttgataatcacgaacaagtagttttctgtagcgacgcggaaacgggtctgaaggctatcattgctgtgcactccacagccttagggccggcagttggcggttgccgcttgtggaactatgcgtctgacgaagatgctatcaacgacgtccttcgtctatcgcggggcatgacttacaaaaacgctatggccggtctccctctgggcggcggtaaaagcgttattatcggtgatgctaaatccataaaaagtgaggcgctgttccgtgcatttgggcgcatggtacaccgtctgtcaggcagctactacagtgcagaagacgtcaatatcactaccggagatattatgatcgttaacaaagaaaccccattcgtggcgggcctggagggtaagtctggaaacccggctccgtttactgctctgggcacctatcgaggtatcaaagcagcggcaaaacatcagtttggctctgacgatctgcgcggtaagaccgttgccgtgcagggtcttgggtccgtaggtttctacctgtgcgaacacctgcatcgtgacggcgctaaactaatcgtcactgacattaatcaggatgccgttaaacgtgccgtagaacaattcgctgctgtggcagttggcctggacgatatctaccgtgttgatgcggacatttatgcaccatgcgctctgggtgctaccctgaacgataacacgatctcgcagctaaaagtacgcatcatcgctggctgcgctaacaatcagctgaaggaagcccgtcacggtgaagtactgcgccagaaaggaatactctacgcgcccgattatgttatcaacgctggcggcatcatcaacgtggcattcgagatgaggccgcagggttacagcgaggcggaatctactgcgaaagttatggcgatttatgacactctgttgaacttgttccaacgtgctgatgccgaacagcagccgacctctgttgtcgcagacctgatggctcaggaaattattcgtagaggcaaagct

SEQ ID NO: 61 - DNA, 1098 bp, Artificial Sequence
  Synthetic polynucleotide
atgacactggagatctttgaataccttgaaaagtatgactacgagcaagtagtcttctgccaggataaagaaagtggcttgaaagcaattatagccatccacgacactacgctgggtcctgctttagggggcactcgcatgtggacctatgatagcgaagaagctgcgatcgaagatgctctacgtctggcgaaaggtatgacctacaaaaatgcagctgccggtctcaacctgggcggtgcgaagactgttattatcggcgacccccgaaaagacaaatccgaggcaatgttccgtgcgctgggacgctacattcagggtctgaacggcagatacatcaccgctgaagatgtgggtacaaccgttgatgacatggacattatccatgaagaaactgacttcgtgaccgggatctcaccaagctttggctcttctggtaacccgtccccggttacggcatatggcgtataccgcggcatgaaagctgctgcgaaagaggccttcggtactgataacctggaagggaaggtaattgcggttcagggtgtcggtaatgtggcttatcacctctgtaaacatctgcacgctgaaggcgctaagctgattgttaccgatatcaacaaagaggcagtccaaagggccgttgaggaatttggtgcgtcggcagtagaaccgaatgaaatctacggcgttgaatgcgacatttacgccccgtgtgcgctgggtgccacggtcaacgatgaaactatccctcagctgaaagctaaggttatcgctggcagcgccaacaaccagctgaaagaagaccgtcatggagatatcatacacgagatgggtatcgtgtatgcgccggattacgtgatcaacgcagggggcgttattaatgtgtacgacgaattatacggctataaccgtgaacgcgctttgaaacgggttgaatctatttacgatactatcgcaaaagtaatcgaaatcagcaaacgtgatggtattgctacctatgtcgcggctgaccgcttggctgaagagcggatcgcatctttaaagaactcccgtagcacctatctgcgcaacggccacgatatcatatcgcgacgt

SEQ ID NO: 62 - DNA, 1101 bp, Artificial Sequence
  Synthetic polynucleotide
atgatcttcgagacattggatacgtacggtcacgaacaggttgtgttttgccataacaaggacgccgggcttaaagcaattatcgcgattcacaatactgtactcggtccggctctgggcggcactcgcatgtggccctataaaagcgaacaagaagctctgaacgatgtcttacgtctgtcccgtggcatgacctacaaaaacgcagttgctggtctaaatatcggtggcggaaaagcagtgatcattggtgacccggccaaagataagtcagaggcgctgttcagagcttttggccagttcgtagacagtctgggtggccgctacatcaccgcggaagacgttggcattgatgttaacgacatggaatatgtgtaccgtgaaactgagttcgtcaccggcgtacatcaggttcacggtgggtcgggtgatccttctccatttaccgcctatgggactatgcagggtctgatggcatctctgaacaaacgattcggcgacgaagaagtgggaaagtacagctacgctgttcaaggcctcggccatgtaggtatggaatatgtcaaacttctgaaagagcgtggtgctaaaatctttgtgaccgatatcaaccagtctttagttgacaaggcggttagcgaatacggagccgaagctgtgggcctggatgagatttatgacgtaccggctgatgtttacagcccatgtgcactgggtgggactgtcaacgagcagaccctcccgcgtctgaaagcgaaaatcatctgcggtgcagctaacaaccagctggctaataacgctatcggcgacgaagtgcaaaagcgcggtatactgtatgccccggattacgcggttaacgcgggcggcgttatgaacgttgccttggaactggaaggttacaaccgagaacgtgcaatgcgcatgatgcgcacgatttatcacaatctgcaccgtatctacgaaatcgctgaacgtgacggtgtaccgacttaccaggccgcagatcgcctgggtgaggaacgtattgccgcgataggcaaattaaaactgcctttagcgcgtggtcagacacgcttcaaaggtcggatccgcgggggcaac

SEQ ID NO: 63 - DNA, 1098 bp, Artificial Sequence
  Synthetic polynucleotide
atggagctgttctcgtatatggaaaactacgactacgaacaagtggtcgtatgtcaggataaggttagcggtctcaaagccatcattgctatacacgatacgaccttagggccggcgttgggcggtactcgcatgtggatgtatgacactgaagcagatgcttttgaagacgcacttcgtctggctaaaggcatgacctacaaaaatgcggctgccggtctgaacctgggcggtggcaaaacagttatcatcggagaccctcgtaaggataaaaacgaggaaatgttcagagcattcggtcggtacattcagggcctgaatggccgttacatcactgccgaagacgtaggtaccaccgtgcaggatatggacatcatttatgaagagactgagtacgttaccggcatttctcccgcttttggtagttccggtaacccgtcaccggtaactgcgtatggtgtctacgttggcatgaaagcggcagctaaagaagcgttcgggtctgacgatctgggtggcaaaaccatcgctgttcaaggtgtgggcaacgtcgcttataacctgtgcaagcatttacacgaagaaggtgctagcctgatcgttactgacatcaataaggattctgttgcgcgcgcagtaacggattttggcgcaaaagctgttgacatcaacgaaatttacggtgtggactgcgatattttcgctccatgtgccctcggagctatcatcaacgatgagactatcccacagttcaaagcaaaagttatcgccggtgcggcaaacaaccagctgaaggaagaacgccatggctccctgatacacgatatgggaatcgtgtatgcgccggattacgttatcaacgcaggcggtgtgattaacgtagcagacgagctaaatgggtacaattccgaacgtgcgcttaaaaaagtagaaggcatttatcagaacatcgaaaaagtttttgatattagcaaacgcgaccaaatccctaccttcaaagcggccgaccgtatggccgaagaacgtatagagcgtatgcgccgttctcgtcgtcagttcctgcaaaacggtcagcacattctgagccgcagagaacgc

SEQ ID NO: 64 - DNA, 1098 bp, Artificial Sequence
  Synthetic polynucleotide
atgaacgtgttctcgcatcctgagtttgataatcacgaacacctgtccttcttttgcgacccggaaacgggtctcaaggccatcgtcgctatacataacacatcacgtgggccggcgttaggcggttgtcgcatgttcccatatgcatctgacgaagaagctgtttgggatgttttgcgtctaagtaaaggcatgacttacaaatctgcactggctaaccttgacctgggtggcggcaaaagcgtaattatcggtgatccccgaaaagagaagaccgaagcgctgctggaagccatgggacgccacctggagagcctgggtggccagtacatcgcggctgaagactccggtacttctgtgccggatctgaaaattatgggtcgtcacacccgtcatgtagcaggaatcagccaacacattggattcgacggcaaaccatctaatggtgacccgagcccggctaccgcgtatggcacttttatcggcttaaaggctgccgtttcccacaaactgggtcgctcggatctgaacggtctgaaagtggctatccagggcatcggtaacgttggtttccgtctggcacgccatctgaaggaagcgggcgctgaactgtgggtttacgacattcacgcagataacatgcagagggccattgatgagctaggcgcaaaacctgcttccgcagaagatatcctgttcctgccagtagacgtcatcgcgccgtgcgccatgggtgctgttttgaatgacgaatccatcccgcagataaaagcacctgtggtagccggcgctgctaacaacctcctggagcgtccggatcacgaccaagcgctgatggatcgtggtatcctgtacgcgccggacttcgctatcaacgctggcggtatcattgatgtctcttacgagcgcaccggagctccgcctgaaaaagtgcgtgcccatgttgacactattggtgataccctgaatgaaatcttcacccggtcggatcgttcaggccgcccgacaggtgccatcgctaacgaactggcggaggaacgttttcacaaacatactgcgcgcgttgacgcaatgcaggaacgtatggcgcacgcgggc

SEQ ID NO: 65 - DNA, 1092 bp, Artificial Sequence
  Synthetic polynucleotide
atggagatcttcaagcgtatggaatcacaagactatgaacagctggtcttttgtcaggataaaaccagcggtctcaaagccattatctgcatacacgatacgactttagggccggcattgggcggtacccgcatgtggaactacgaatctgaggaagaagcgattgaagacgctatccgtctaggcagaggtatgacttacaaaaatgctgctgcgggcctgaacctgggcggtggtaaaacagttatcattggagaccccctgaaggataaaaacgaggaaatgttccgagcattcggccgttttatccagggtctgaacggccgctatatcactgccgaagacgtgggtaccaccgtagctgatatggacctgattcatgaggaaacggatttcgttactggtatctcgccagcatttggttcttccggcaaccctagcccggttaccgcgtacggatgctacctgggcatgaaagctgcggcaaaagaagcgttcggggatgactccctggaaggcaaaactatcgctgtacaaggtgtgggtaatgtcgcttttaccctgtgtcggtatttacacgaggaaggtgctaagcttatcgttactgacattaaccagcaggctgttcagcgcgcagtggacgaatttggcgcaaccgctgtaggcataaatgagatctactctcaggaagccgatatcttcgccccgtgcgctctgggtgcgattattaacgacgaaaccattccgcagctgaaagttaaagtagttgccggaagcgccaacaaccagctgaaagaagaacgtcatggcgatatgctcgaagagcgcgggatcgtctacgcaccagatttcgtgatcaacgcaggtggcgtgatcaacgtagctgacgaattgaacgggtataatcaagaaagggctatgaaacgtgttgagactatctacgacagtatctctcgtattttcgaaatcgcgaagcgtgatggcattccgtcctaccaggcggcagatcgtatggcagaagaaaggatcgatcgcgtatgccgttctcgtagccagttcctgcgcaacgaacacaacattctgtcgcgtcgc

SEQ ID NO: 66 - DNA, 1092 bp, Artificial Sequence
  Synthetic polynucleotide
atgggcacgacactctttgaaagcccatctttcgccaaccatgagggtgtacacgcgttctacgatgaaaaaaccgggttgaaggcaattgtggctgttcactcaactgcacgcggccctgctgttggtggtactcgtatgtggaattatgcgagttccgctgaagctctggaagacgtccttcgtctgtcgaaaggcatgtcttacaaaaacgccatcgccgacttagagatgggcggtggaaaatccgtaatcataggtgattctcgaacccagaagagcccggaactgtttcacgcgttcggccgctatctgaacggcctgggtgggcattactacgcagctgaagacgttggaacctccgtggaggatatcgctgaagcacgtaaagtcactgagttcgttctgggtctgaaagacggcccggaagcgtctggtgatccgagccccgtgaccgctgaaggcgttttcagatcaagcctggttgtagctcgtcgcctgtttaaccaagacgatatgacgggtctaactgtggctctgcaaggtgttggccatgtcggtgcctacctggcagaaaaattgcacaaggccggagcgaaactaattatcactgatgtgaatcaggcaaacctggaagctgtggcagctaaaacaggcgcggagatcgttgctccggacgcgatttatgacgtagcggctgacatctatgccccgtgtgccctgggggctaccttgaaccctcagactctggatcgtctgaaggttaaagctgtatgcggtgcagctaataaccagctcgcgaccgccgacattggcgacgaactgttcaaacgtggtatcctgtactctccggattacgtgatcaacggcggcggtattatcaacgtagcatctgagatgaacgcacgccagaccggtggtgcgtacgatgctagctgggtggaaggtaaactgtcccgcttgatggaaacgtttgaagaaattttagaacgttcggttagtgaaaataagcccactcacctgatagcggatgctattgcggaggctcgtataaaagctgctgcggacgcaaaggccgaagctcagaaagtt

SEQ ID NO: 67 - DNA, 1098 bp, Artificial Sequence
  Synthetic polynucleotide
atggagctgttcaagtatatggaaacctacgactacgaacaaacggtcgtatgtcaggataaagaaagtggtctcaaagccatcattgctatacacgatacaactttagggccggcgttgggcggtacccgcatgtggacttataaatctgaggaagacgcatttgaagacgctcttcgtctggcaaagggcatgacttacaaaaatgctgcggctggtctgaacctgggcggcggtaaaaccgttatcatcggtgatcctcgtaaagacaaaaacgaggcaatgttccgagcctttgggcgcttcattcagggcctgaacggcagatacatcacggcggaagatgtgggtactactgtagctgatatggacctggtttatcaggaaaccgaatacgtgaccggaatcagcccagcattcggatcatccggtaacccctctccggttacagcttacggcgtttatgtgggcatgaaggccgcggctaaagaggcttttggtgacgatagcctggaaggtcgtacggtcgcggttcagggtgtaggtaatgtttcctacaaactgtgcgattacctacataaagaaggcgcaaagctcatcgtcactgacattaacaaagatgcggtcaagcgtgctgtggaagatttcggcgctaaagcggtagacgttgacgatatttattcgcaagatgctgacatctactctccgtgcgccctgggggccaccatcaacgatgaaaccattccgcagcttaaagcacgtgtaatcgctggcgctgcgaacaaccagttgcgtgagtcccgccacggtgacataattcaggacaaaggcatcgtttatgccccagactacgttatcaacagcgggggtgtgatcaatgtctctgacgagctgatcggttacaaccgcgaacgtgccctgaaaaaagtggagactatttacgataacatttctaaaatctttgaaatctcgaaaagggatggcattgcttcctataaagcagcagaccgtatggcggaagaacgtatcgagaccatgcgcaaaagccgccgtcaattcctgcaaaacggtatgcatattctgagccgcggacgtacc

SEQ ID NO: 68 - DNA, 1098 bp, Artificial Sequence
  Synthetic polynucleotide
atgacactggagatctttgaataccttgaaaagtatgactacgagcaagtagtcttctgccaggataaagaaagtggcttgaaagcaattatagccatccacgacactacgctgggtcctgctttagggggcactcgcatgtggacctatgatagcgaagaagctgcgatcgaagatgctctacgtctggcgaaaggtatgacctacaaaaatgcagctgccggtctcaacgtgggcggtgcgaagactgttattatcggcgacccccgaaaagacaaatccgaggcaatgttccgtgcgctgggacgctacattcagggtctgaacggcagatacatcaccgctgaagatgttggtacaaccgttgatgacatggacattatccatgaagaaactgacttcgtgaccgggatctcaccaagctttggctcttctggtaacccgtccccggtcacggcatatggcgtataccgcggcatgaaagctgctgcgaaagaggccttcggtactgataacctggaagggaaggttattgcggttcagggtgtgggtaatgtagcttatcacctctgtaaacatctgcacgctgaaggcgctaagctgattgtcaccgatatcaacaaagaggcagttcaaagggccgttgaggaatttggtgcgtcggcagtagaaccgaatgaaatctacggcgttgaatgcgacatttacgccccgtgtgcgctgggtgccacggtaaacgatgaaactatccctcagctgaaagctaaggttatcgctggcagcgccaacaaccagctgaaagaagaccgtcatggagatatcatacacgagatgggtatcgtgtatgcgccggattacgtgatcaacgcagggggcgttattaatgtggcggacgaattatacggctataaccgtgaacgcgctttgaaacgggttgaatctatttacgatactatcgcaaaagtaatcgaaatcagcaaacgtgatggtattgctacctacgtcgcagctgaccgcttggctgaagagcggatcgcatctttaaagaactcccgtagcacctatctgcgcaacggccacgatatcatatcgcgacgt

SEQ ID NO: 69 - DNA, 1092 bp, Artificial Sequence
  Synthetic polynucleotide
atggcaatcttcgacaaaatggagcagcatgattatgaacaactggtcttttgtcaggacaagaccagtggtctcaaagccattatctgcatacacgatacgactttagggccggcgttgggcggtacccgcatgtggaactacgctactgaagaagaagctattgaggacgcaatccgtctaggccggggtatgacatacaaaaatgctgcggctggccttaacctgggcggtggcaaaaccgtaatcattggtgatcctctgaaagacaagaacgaagaaatgttccgtgcatttgggcgcttcgttcagggcctgaacggtagatatatcaccgcggaggatgtgggtactactgtagcagatatggacctgatccgtgaagaaacagacttcgttaccggagtgagcccagcctttggatcatctggtaatccctctccggttaccgcttacggcgtttacaaaggcatgaaggctggtgccttagaggccttcggcgatgactcgctggaaggtaaaacggtaactgttcagggtgtgggtaacgttgcgtatactctgtgcaaacacctgcatgaagaaggcgctaagctcatcgtctctgatattaacgaagaagcggtacagcgtgctgtgaacgatttcggcgctgttgcggtggcaccgaacgatatttacagccaagaagctgacatcttcgctccgtgcgccatgggggccatcattaacgatgaaaccatccctcagctgaaagtcaaactggtagctggctccgcaaacaatcagcttaaagaggaacgccacggtgacgagctcgaggcgcgtggcatcgtttatactccggactttgttataaacagcgggggtgtgatcaatgtcgctgacgagctgtacggttacaacgaagaacgcgccctgaaacgtgtaggaactatttacgatagcatttctaaaatctttgagatctccaaaagggacggcatcccatcttataaagcagcagaccgtctggcggaagaacgtattgagcgagttgctaaatcgcgctcctctttcctgcgtaacgaacataacatcattagcaggcgc

SEQ ID NO: 70 - DNA, 1095 bp, Artificial Sequence
  Synthetic polynucleotide
atggagctgttcacatatatggaaaagtacgactacgaacaagtggtcgtatgtcaggataaagccagtggtctcaaagcaatcattgctatacacgatacgactttagggccggcgttgggcggtacccgcatgtggacctatgcatctgaagaggctgcgtttgaagacgctcttcgtctggccaaaggcatgacttacaaaaatgctgctgcgggtctgaacctgggcggcggtaaaaccgttatcattggagacccccggaaggataaaaacgaagcaatgttcagagccttcggtcgttacatccagggcctgaacggacgctatatcactgcggaagatgttggcaccactgttcaggacatggacacgatccatgaggaaaccgaatacgtgaccggtatttcacctgcttttggtagctctgggaacccatcgccggtaaccgcatatggtgtttacgtgggcatgaaagccgctgcgaaggaggctttcgggactgactccctggaaggcaaaactgttgctgtacaaggtgttggtaacgtcgcatacaatctctgcaagcacctgcatgaagaaggcgcatccttagtggtcacagatattaacaaagaaagcgttgatcgtgcggtggcagacttcggtgctaaagcagtagatccggacgacatctatgaggtcgattgcgacatctttgctccgtgtgccctaggcgctatcattaacgatgataccatcggtaaaattaaggcgaaagttatcgctggcgctgccaacaatcagctgcgtgagaccactcacggcgatcagatccatgaaatgggtatagtatacgcgccggactacgttatcaacgcgggaggcgtcatcaatgtggctgatgagctgtatggttacaacagggatcgtgctatgaaacgcgttgacggtatctacgacactattgctaaagttattgaaatctctaaacgcgatggcattccaacgtacgcagccgctgaccgtcttgctgaggaacgtatcgcacagatgaaacacagccggtcgcagttcctgatgaactcccaacacatcctgggacaccgtaaa

SEQ ID NO: 71 - DNA, 1098 bp, Artificial Sequence
  Synthetic polynucleotide
atgacactggagatctttgaataccttgaaaagtatgactacgagcaagtagtcttctgccaggataaagaaagtggcttgaaagcaattatagccatccacgacactacgctgggtcctgctttagggggcactcgcatgtggacctatgatagcgaagaagctgcgatcgaagatgctctacgtctggcgaaaggtatgacctacaaaaatgcagctgccggtctcaacctgggcggtgcgaagactgttattatcggcgacccccgaaaagacaaatccgaggcaatgttccgtgcgctgggacgctacattcagggtctgaacggcagatacatcaccgctgaagatgtgggtacaaccgttgatgacatggacattatccatgaagaaactgacttcgtgaccgggatctcaccaagctttggctcttctggtaacccgtccccggttacggcatatggcgtataccgcggcatgaaagctgctgcgaaagaggccttcggtactgataacctggaagggaaggtaattgcggttcagggtgtcggtaatgtggcttatcacctctgtaaacatctgcacgctgaaggcgctaagctgattgttaccgatatcaacaaagaggcagtccaaagggccgttgaggaatttggtgcgtcggcagtagaaccgaatgaaatctacggcgttgaatgcgacatttacgccccgtgtgcgctgggtgccacggtcaacgatgaaactatccctcagctgaaagctaaggttatcgctggcagcgccaacaaccagctgaaagaagaccgtcatggagatatcatacacgagatgggtatcgtgtatgcgccggattacgtgatcaacgcagggggcgttattaatgtggcggacgaaaaatacggctataaccgtgaacgcgctttaaagcgggttgaatctatttacgatactatcgcaaaagtaatcgaaatcagcaaacgtgatggtattgctacctacgtcgcagctgaccgcttggctgaagagcggatcgcatctttaaaaaactcccgtagcacctatctgcgcaacggccacgatatcatatcgcgacgt

SEQ ID NO: 72 - DNA, 1053 bp, Artificial Sequence
  Synthetic polynucleotide
atgtcggtgttctcacatgttgagtttgatggccacgaacaagtagtcttcggtcacgacaaggccagcggactgaaagcaatcattgctatacataatacgaacttagggccggcgttgggtggttgccgcatgtggaactatgcaaacgacgaacaggctcttcgtgatgttctccgtctgtctcggggcatgacctacaaatccgctctggctaatctgcctctgggcggcggtaaagcggtaatcattggcgatccacacaacggtaaaagtgaagcgctgtttcaggccatgggcgacttcgtggacactctgggtgggcgctacatcacagccgcagattctggtactggaccggctgaaatgcagatcatggctgagcgtagccgccacgttgcgggcgcgaaccagcgtgaagcattcgatggtggtgttcgttccggcgacccgagcccctctaccgcttacggcgtctttattggtatccaagtagccgttaagcacaggctgcgtcgcgacgatctgaaagggttgcgggtcgcaattcagggcgtgggtcaggttggcttccatctagctcgtctgctgcgtgacgctggtgcagaactctgggttaccgatatcgtagatgcgaacgttagacgcgctgtggagcagctgggcgcgaaagctgtactgcaacatgaaatctatggtctgaacgttgatgtgtttgccccgtgtgctatgggtggcattatcaatccgcagtctctggaggctctgcgtgtgccgatcatcgctggtggcgccaacaaccagttagcggacgcacagcttgcagaagaactgaaacgtaacggctgcctgtacgcgccggattacgccattaacgctgggggaatcatcgacgtatatttcgaacgctccggcggttctgcggcggaactcaaggctcacattgaaggtatcggtaacactctccgtcagatcttcattcgtgctgatgaagagggccgaaccactacggaagttgctgacagactggcagaagaacgcttcggtcgtgtg

SEQ ID NO: 73 - DNA, 1092 bp, Artificial Sequence
  Synthetic polynucleotide
atgaagctgttcgactatatggagaaatacgattacgaacaagtggtcatctgtcaggacaaaaatagtggtctcaaagccattatcgctatacacgatacgaccttagggccggcgttgggcggtctgcgcatgtggacttatgcaactgaagaagaagctatggaggacgcacttcgtctggctcggggcatgacctacaaagcggctgccgcgggtctgaacctgggcggcggtaaaacagttctgattggagatcccaagaaagacaagtccgaagaactgtttagatcactgggtcgttacatcgagggcctgaacggacgctatatcactgccgaagatgtaggtaccagcgttgaagatatggacctaattcatctggagaccaaatacgttactggtatctcgccagctttcggctcttctggcaaccctagcccggtaacagcatttggcgtgtataaaggtatgaaggctgcggcaaaagaagcgttcgggtctgacgctctggatggtttggttgtagctgtccagggtgtgggcaacgttgcctactccatgtgcgagtacttacacaaagaaaatgttaaactgatcgtaactgacattaacgaagaaaacgttcagcgcgcggtaaacgattttggtgcaatccgtgttagcccggaggaaatctacgatgtggagtgcgacattttcgctccgtgtgctcttggcggtatcatcaatgacgacactatcgaacgtctgaaatgcaaagttgtagctggcagtgcaaacaaccaactgcgtgaagatcgccatggtgatattctggaagaacgcggaatggtgtatgcgccggattacgttataaacgcaggcggtctgatcaacgtcgccgatgagctcgttggctacaatcctgaacgtgcgatgaaaaaagtagaaggcatttatgacaacatcctgcgtgttttcgaaatcgccaagcgagatggtatcccatcttatcaggcggcagaccgtatggccgaagaacgtatagcttctctgcgccagagccgttctaccttcgtgcagaccgagcgtcactccttaaaccagcgc

SEQ ID NO: 74 - DNA, 1095 bp, Artificial Sequence
  Synthetic polynucleotide
atggcaatcttcgagactttggcgggcaccgggcatgaacaagtggtcttttgtaacgacgaagctacgggtctgaaggccattatcgctatacacgatacaactttaggcccggcacttggtggttgccgcatgtgggactatggctctgaagaggaagcgctcgaagatgttctgcgtctgtcacggggcatgacctacaaagctgctgtatccggtctgagtctgggaggtggcaaaagcgttatcattggtgaccctaaaaaactgaagaatgaggcattcttccgtacctttgggcgcttcgtcgattctctgagcggcagatacatcaccgcggaagacgtaaacattcgtgtgaaagatatggaatcggttgctctggaaactccatatgtaaccggcatcaactctcgtgttggaggttccggtgacccctctccggttacagcctggggcgtgtttaacggtatcaaagctagcgttaaacacaaactgggcaaggattcagtgaacggtctaacggtagcggttcagggttgcggtgcagttggcactttcctgactgaatttctgacccaggaaggcgcaaaagtgttcgctgccgacctaaatcaggacaaagtaaagaacgtggtcgaaagcttcggtgctgaggcggttgatctgaataaaattcattcccttccggtagacgtgtacgcgccgtgtgccctgggtggcatcctgaacgataacactattccggaactgcaaaccacgatcgtttctggaggcgccaacaatcagctgttagatgaggctaaacacgctgcgatgcttaaagaaaaaggtatcctctacgcccctgactacgtgataaacgcgggcggtctgattaacgtatatcaggaactgcaaggctacgatgcagatgctgcgcgaactaaagccgctgggatctttgatacccttatcaacatctataaggagtcggacgaacagggtattaccactatccaggcaagcaataaaattgccgaggaccgtatcaatagtgttcgtaacatgaaagatctgcgcaacaacttcgaaggacagctgtggatcaaccaa

SEQ ID NO: 75 - DNA, 1044 bp, Artificial Sequence
  Synthetic polynucleotide
atgccaatcttcacagctcctgactttgataaccatgagcaagtggtcttctgtaatgacgcggaaacgggtctgaaggccattatcgctatacacgataccactcgtgggccgtcattaggcggttgccgcatgtggccgtatgcatctgaagcggctgctgttactgacgcactacgtctttcgcgcggcatgacctacaaatccgcattggcgggtctgcccctgggcggcggtaaaagcgttattatcggagatgccaaaactcagaagtctccggctctgtttagagccttcggtcgtttcgtagacagtctgggtggccgttacatcgctgccgaagatgtaggtaccggcgtggcggacatcgaggcaatgaggcaggttactcggcacgtcgctggcaccgctggtggcagcggtgacccgtctccggttacagcgtacggcgtatttcaggggattcgcgccgcagcaaaagcgaaactcggccgagatgaccttgcgggtctgcgtgtggctgttcagggtctgggtcatgtgggcctggatctggctcgccagctctatgaagctggcgcagccctaattgtcgccgacatcgatctggatcgtatcgcacgtgctacgaccgcgtaccgggctgaagccatgccagctgatcgcatccacgctgcggacgttgatatattcgcaccgtgcgctctgggtgctattctgaacgacgcaactatcccggaaatcaaagcgggaatcattgctggtgcagctaacaaccaactcgcggaagagcgccatggagcagctctgatgaaacgaggcattctgtacgcgccggattatgcaatcaatgctgggggcatcattaacatccaccacgaatccgcgggtaaatacgaccgtgctgctgcactccgccaggttgaagggatctatgatactttgctggaaattttcgcgcgtgccgcggctgaaggtatcccgaccagcgatgctgcggaccgtgttgcggagactcgttttggcaagcatcgtcaggcggca

SEQ ID NO: 76 - DNA, 1071 bp, Artificial Sequence
  Synthetic polynucleotide
atgacagacggggtatttggtagagatggcggccatgagcaagtggtttactgtcaggacccgcagacgggtctgaaggccatcattgctgtgcactccaccgcattaggaccagcgttgggtggtactcgcttctatccctacgcatctgaacaggatgctcttaatgacgttctcgctctgtcgcgtggcatgtcatataaaaacgcgctggctggtctggatctgggcggcggcaaagcggtcatcattggtgaccctgccactgtaaaaagcgaagccctgctgcgtgcatacgggcgcttcgttgaaaccctgggtggccggtacatcaccgcttgcgatgtcggtacttatgtggcggatatggacgttgttgctcgtgagacccgttacgtaaccggccgcagccgtgacgatgggggtgccggcgactcttctgttctgacagcttacggtgtctttcagggcatgcgcgcatccgctgaacacgtttggggtactccggaactgcgtggtcgcagggtaggcgttgcgggtgtgggtaaagttggccatttgctggttggtcacctagtagaagctggcgcagaggtcgtggtcactgatgtaagtgaagctgcgatcgaccgtgttcggtcggctcacccgtctgtggaggtggtagcagacactgataccctggtagcctccgatatagacgtttacgcaccgtgcgcgcttggcggcgcgctcaacgatgctaccgtggaagttctgcgtgccaaggttgtatgtggagcagccaacaatcaactggctcatccgggcgttgaaaaactgctggatgaacgcggtattcttttcgcgccagattacctggtgaacagcgggggcgttatcatggtgagcgacgaattacacggcttccagtatgaacgcgctcatcgcaaagtttctgcattatacgaaactaccaaaaaagtatttgctctggcggaggaagaaggtgttccgcctgccacggcggctgatcgattggctgaacgtaggatggccgaagttagccgtctccgtagcatcttgacacgt

SEQ ID NO: 77 - DNA, 1092 bp, Artificial Sequence
  Synthetic polynucleotide
atgtcggtgttcgcacatcctgactttgatcgccacgagcaagtagttttctgtcacgaccaggctagcggtctgaaggccatcattgctatacatgatacgcgtttagggccggcgttgggcggttgccggatgtttccatatgcgtctgacgatgaagcacttcgtgacgttctccgtctgtcccgcggcatgactctgaaatcatctctggctggtctgaaactaggcggcggtaaagcggtcatcatcggtgatccccacaccggaaaaagccaggctctgctgcacgccatgggggacttcgtcgactccctgggcggtagatacattacagcagctgatagtggtactggtgacgcggaaatgcaggcattcgctcaacgtacccgccatgtggtaggcgccacgccgcgtactctgctggatggctctgttgcttctggcgacccgagcccgtccaccgcgtacggggtatatgttggtttaaaggaagccgttcgccagcgtctgggccgtgatgagctgaccggtctgaaagtggctatccagggtgtaggccacgttggtctgggccttgcccgccatctgaaagctgcgggtgctgaactgtgggttgctgacattttcgatgctaacgtcaaacaggcaatggaagaggtgggagcaaatgttgttcgtccgcaggatatctacggcctggatgtggacgtctttgcgccttgcgcaatgggtggcatcttgaacgaacaaactctggaagtactgcgtgcaccagtgatcgccggcgctgctaacaatcagctggcatcagcgggtattggagttgaactacagcgccgcaaccagctgtacgcgccggactacgctatcaacgctggtggtatcatcgatgtatattaccagcgtaacggcggtagcgccgctcagatagatgcccacgttaacgctattgctggcaccctccgtgaaatcttcgagcgagccgctgcttctggtgaatgcacctccgttatcgctgatcgtctggcgctggaacgtttacaggcaggtggtgcgccgcaagtagcaactctgcaacgtcaggcgagc

SEQ ID NO: 78 - DNA, 1095 bp, Artificial Sequence
  Synthetic polynucleotide
atggagatcttcaagaaattggaagaacatgactatgaacaactggtcatttgtcaggataaaaccagtggtctgaaagccatcatcgctatacacgatacgactttagggccggcgcttggcggtgcacgcatgtggacctacgagtctgaagaagctgcaattgaagacgctctccgtctggcgcggggcatgacttacaaaaatgctgccgcgggtctgaacctgggcggcggtaaaacagttatcattggagacccccgtactgataagaacgacgagatgtttcgagccttcggtcgttacatcgaaggcctgaacggacgctatatcactgctgaagatgtgggtaccaccgaggaagatatggacctgattcacctggagacggactacgttaccggtacgagcgcagctgattccggctcttcgggcaatccgagccctgtaactgcattcggcatctataaaggtatgaaagcgaccgccaaggaagcgtttggtgacgactcactggctgggaaaaccattgcagttcagggcgtaggtaacgtcgcttactccctttgcgaatacctgcatgaggaaggtgccaaactgatcgttactgatatcaacgaagaggccgtacagcgtgctgtggaagcgttcggcgcgactgctgttggcatcgatgaaatctacagccaagaagcagatattttcgctccatgcgcgcttggtgctgtgattaacgatgacaccatcccgcagttaaaagttaaggtgatcgccggttctgcaaataaccagctgaaagacccgagccacggtgaccagctccatgaaatgggaattgtttacgcgccggactatgtgatcaactctggtggggtaatcaacgttgcagacgaactggatggctacaatcgtgagagagctctaaaacgtgtggctactatttatgatacaattgaaaaaatatttgcaatctctaaacgcgataacatcccgtcctatgtagctgctgatcgcctggcggaagaacgtatcgcacgtgttgcgaaggttcgctcgcaattcttgcagaacgagaaaagcgtcctgtctcgccgt

SEQ ID NO: 79 - DNA, 1098 bp, Artificial Sequence
  Synthetic polynucleotide
atgacactggagatctttgaataccttgaaaagtatgactacgagcaagtagtcttctgccaggataaagaaagtggcttgaaagcaattatagccatccacgacactacgctgggtcctgctttagggggcactcgcatgtggacctatgatagcgaagaagctgcgatcgaagatgctctacgtctggcgaaaggtatgacctacaaaactgccgcagctggtctgaatctgggcggtgcgaaaaccgttattatcggcgacccaaggaaggacaaatccgaggcaatgttccgagctctcggacgctacattcaggggctgaacggtcgttatatcactgcggaagatgttggcaccaccgtggatgacatggacatcatccatgaggaaacggattttgttacgggcatttctccgtctttcggttcgagcggtaacccgtccccggtgactgcgtacggcgtatatcgtggtatgaaagctgccgcaaaggaagctttcggcacagacaaccttgagggtaaagttatcgctgtccagggtgtaggcaatgtggcctaccacctgtgtaaacacctccatgctgaaggcgcaaaactgattgttactgacatcaacaaggaagctgtgcagcgtgccgtagaggaatttggggcttctgcggtcgaacccaacgaaatttacggggttgaatgcgatatctatgctccgtgtgcactgggtgcaaccgttaacgatgaaactatcccgcaactgaaagctaaagttattgcgggctcagcgaataaccagctaaaagaagatcgtcatggtgacatcattcacgagatggggatcgtgtacgctccagattacgtgatcaacgctggcggcgtcatcaacgttgcggatgaactgtacggttataaccgtgagcgcgctttgaaacgcgtagaatcaatttacgacaccattgctaaagttatcgaaatcagcaaacgtgacggtattgccacctacgtagcagccgatcggctggctgaagagcgcattgcatccctgaagaatagcagatccacgtatctgcgtaacggacacgacatcatctcccgtcgc

SEQ ID NO: 80 - DNA, 1047 bp, Artificial Sequence
  Synthetic polynucleotide
atggcactgttcgagcatactgaatacgatggccacgaacaagtggtcttttgtcacgacaaggttacgggtctcaaagccatcattgctgtgcatgatacaaccatggggccggcgttaggtggtacccgcatgtggaactatgcatctagtgaagaagctttgactgacgttcttcgtctgtcacggggcatgacttacaaatcggctctggcgggcctgcctctgggcggtggcaaagcggtaatcattggtgacgctaaaaaagataagtccgaggccttcttcaaagcatatgggcgttttgttaattctctgggaggtaagtacatcaccgctgaagacgtaaacatccgtacagcggatattgacatcgtcgctactgaaaccagcttcgtagcaggcaccgcgtccaaagctggagacccatctccgcacactgctgagggcacttacctgggtctgaaagcagcggcaaaacacgcttttggcaacgaagatctgaaaggtgtgcgcatcgccatacagggtttaggggctgttggttatgatttcgccgaatactgcgctaaggaaggcgcaaaacttatcgttgctgacgttaatgaggaagccgttgaacgagccgtgaaagaactgggcgctgaggcggttagcatccacgacatttactctgttgattgcgatgtatatgcaccgtgcgctctgggtgccaccataaacgacgatacgctcaaactaattaaagcgaaagtgatcgctggcagcgctaacaaccagctggcaacccccgctcatgataaaatcgtaaaagacatgggcatcctatacgcaccggattatgttatcaacgctggcggcgtgatccatgtgtgttccgaagctgcgaacttcagcttggaggacaccgcaaagcgtgtaaaagctatttacggtactctggataagatttttactcgcgccaaggatgaaaataggccgacaggtgaaattgcagacgaaatggcgcgtgaaatcttggccaaaaaactggcgtcaaaaactgcg

SEQ ID NO: 81 - DNA, 1104 bp, Artificial Sequence
  Synthetic polynucleotide
atggagatcttcgcacaattgagccagtatgactacgaagaactggtcttttgtcacgatgaaaattcgggtctgcgcgccattatcgctatacatgatacgaccttagggccggcgcttggcggtgtacgtatgtggacttacgagtctgaacaggaagctgttcaggacgttctccgtctggcaagaggcatgacttataaaaacgctgtggcgggtctgaacctgggcggcggtaaggcggtcatcattggtgaccctaacaaagataaatcagaggaactgttccgcgcttttgggcgttacgtacagggcctgaacggccggtacatcacagcagaagacgttggtaccactgaggaagatatggacaccatttatgaagaaaccgattacgtgaccggagttagcccagccttcggatccggtggtaatccctctccggtaacagcttacggcgtttatcagggcatgaaggctgccgcaaacgtggcgttcggttccgacgacctgaacggtaaaactgtggctgttcaaggcctgggtaacgttgctttcaacctctgccgtcacctgagtgaagagggcgctaaactggtcgttactgatctaaacgaagaaagggtacagcgagcagttgaacagtttggagcagaggccgttggcgtacaggatatctacggcgtggcttgcgacatctttagcccgaatgcgctgggtggtgttcttaatgacgaaacgattccgatgctgaactgccgtgtggtagcaggcgctgctaacaaccaactgaaagaagagcgtcacggcaaaatgctggaagaacgtggtatcgtctatgcgccggactacgttatcaacgccggtggtgtgatcaacattgctgatgagctgatcggctataaccgcgaacgcgcgatgaaaaaggttgagtctatttacgataccgtgttaaatgtcttcgcaatcgccgaacgtgatggcatcccaagctaccaggcggctgatcgtatggcggaggaacgcattcagtccattcgtaggtctcgtaacccgttcgtacgcgatgaaaagaacgtgttccatttacgccgcggtcgtcac

SEQ ID NO: 82 - DNA, 1041 bp, Artificial Sequence
  Synthetic polynucleotide
atgtcgctgttcgagcataaagaatttgatcagcacgaacaagtggtcttctgtcacgacaaggaaacgggtctcaaagccatcattgctatacatgatacaactttagggccgtcattgggcggtacccgcatgtggaactatgcgtctagcgcagaagctcttactgacgttctgcgtctgtcccggggcatgacctacaaatctgcactggctggtctgcctctaggcggcggtaaagcggtaatcatcggtgacgctaaagccattaagaccccggatctgatgcgtgcatacgggcgcttcgttaatagtctgagcggcagatatatcaccgcggaggacgtaaacattcgtacttccgatatcgctcacgttgctgaagaaacttcttttgtggcgggaacagcggaaaaagctggagacccatcaccgcatactgctctgggcacctacctgggtctgaaggcagcggcaaaacacaaatttggcaacgataacctgaatggtctgaagatcgccgtgcagggcttaggggctgtcggttacgatttcgcagaatattgcgctaaagagggtgcccagttgttcgttactgacattaacgaagacgcctgcaacaaagccgcgaccgaactgaacgctacgatcgttggtctggacgatatctacggtttagatgtagacgtttatgcaccatgcgctctgggcgctaccataaatgatgagacgcttaaacaaattaaagcgaaaatcatcgctggcagcgctaacaaccagctggcaactccccctcacgataaaatcgtaatggacatgggcattctatacgcaccggattacgttatcaacgctggcggcgtgatacatgtgtgttctgaagctgcgaacatgtcgcgtgaggagaccgacaagcgtgtgcgcgatatctacgatactctggacaagatttttgctcgctccagcgccgaacacaggccgaccggtgaaattgccgatcagatggcgcgtgaagtaattgccaatgcaaaagcggcacgt

SEQ ID NO: 83 - DNA, 1086 bp, Artificial Sequence
  Synthetic polynucleotide
atgaagctgttcgacactttacagacaatgggccatgagcaagtggtcctatgtagcgatccggttacgggtctgcgcgccgtaatcgctatacacgatacctccttagggccagcgttgggtggtacccgtatgtggaactatagtactgacgaagatgcaattactgacgctcttcgtctctctcggggcatgacctacaaagcagctgtttctggcgtaaatctgggcggtggtaaagcggttatcattggagatcctcgtaccgacaaaaacgaagcgaagtttcgctcgtacggcaaaatggtggaatcactgcgtgggcgctacatcactgctgaggacgttggtactagcgtgcgtgatatggaatggatccgcatggaaacccgcttcgtaacgggcgtgggtggcgttggaggctccggtgacccctctccggtcacagctttcggtgtttatagcggcatgaaagccgcagctaaatttgcctggggtaccgatagtctgtccaaaaagagggtagtagttcagggtgcgggtcacgttgcttcgaacctggttaaacacctggtcaaagatggcgcaatcgttttcgtgtctgacatttacgaagaacgtagtaacaaagttgcggccgaaacgggcgctactgtgatcagcccggacgaggtttttaccactccgtgcgatatcttctctccgaatgctctgggggccgtcctgaacaacgaaaccattgcacagctcagctgctccgtagtgtgtggcgctgcgaacaaccagcttcaaaatgaagatgtacatgctgcggccctgcaaaagcagaacatcatttatgcaccagattacgtggtgaactctgggggtctaatgaatgtggcgtcggaggttacaggctacgaccgtgatagcgttatgcggcaggctgaaggtatttacgacatcactatgaacatcctcaccactgcgcgtgacaaaaacatcctgaccatcgaggcatctaatgcgattgctgaagaaagaataaaaaaagttcgccacgttcatgggatgtttaccggcactccgtctattcgcggactg

SEQ ID NO: 84 - DNA, 1092 bp, Artificial Sequence
  Synthetic polynucleotide
atggagatcttcaagtatttgaacgaatacgactacgaacaactgctcttttgtcacgatgaacagagtggtctgaaagccattatcgctatacatgatacgaccttagggccggcgcttggcggtactcgcatgtggacctatgcaactgaggaagaagctattgttgacgcactgcgtctggctcggggcatgacatacaaaaatgcggctgccggtctgaacctgggcggtggcaaaactgtaatcatcggagaccctaaaaaggagaaaaacgaagaaatgttccgtgcattcggtagatttatccagggcctgaatggccgttacattaccgccgaagatgtcggtaccactgtgcaggacatggatacgatccacgaagagactaactacgttaccggcatttctcccgctttcggtagctcaggtaacccgtccccggtgactgcgtttggtgtatatcgcggcatgaaagcggcagctaaagcagcgttcgggaccgactctctggaaggccgtaccatcgctgttcaaggtgtaggctcggttgcttataacctgtgcaagtacttacatgaagagggtgctaacctggtggttactgacatcaataaagaagctgtccagcgcgcagtagatgaatttggcgcaacagccgttgaaacggacgaaatctacggtgttgactgcgatatttacgctccatgtgcgcttggagctaccatcaacgatgacactatctctcagctgaaagccaaagttatcgctggtgcggcaaacaaccagctgaaggataccacccacggtgatgctatccacgaaatgggcatctactatgcgccggattacgtcataaacgcaggcggtgtgatgaacgtagcagatgagctctatgggtacaatcaagaacgtgcgttgaaacgtgtagaaggaatttatgacaacgtcgcacgcgttttcgaaattgccgagcgagatggcatcccttcctaccaggcggcggaccgtatggccgaagaacgtatagagcgtatgcgcaaaagccgttctacattcctgcaaaacgaaaaaagcattctgaaccgccgg

SEQ ID NO: 85 - DNA, 1074 bp, Artificial Sequence
  Synthetic polynucleotide
atgcactacttcgacactattgcggagatgggccatgaacaagtggtcttttgtcacgataaggctagtggttatcgcgggatcatcgccatacatgatacgaccttaggcccggcattgggtggttgccgtttctggaactacgcatctgacgaagaagctgttattgacgctcttcgtctatcaagaggcatgacttataaaaatgcggtagctggtctcaacctgggcggaggtaaaagcgttatcatcggcaacaataaaaccgcacagcgcgagatgctgttccgtgcccacgggcgttttgtcgattccctgggcggtcggtacgtgacagcggaagacgttggtactactgtagaagatatggacttcgttcatatggaaaccacccacgtgacgggcatcggatctaaatccggcgacccttcgagcgttactgctcgcggcgtcttccgtgccattcaggcaagcgcatttcagaaatggggttctaaggagctgaccggtaggacagtagcgatccagggtcttgggcacgtgggttactatctggctcgtgaactgcatgttgctggcgcccgcctgctggtaactgatattgatgccggccgtatcgatcgcgttgtgcaagaatttggtgcgacctctgttgcgctggctgacatctacgctgctaaagcagatattttcgcgccgtgcgcactgggtggcatactgaacgacgacaccatcccccagttatcagttgagatcgtttccggagctgcaaacaaccagctgctggaagatcgtcacggcgacgaacttgagtcccgcggcatcctgtacgctccagattatgtggccaatgcgggcggcgtgattaacgtatacagtgaactgacgggttggtctgcggaccgtagcctgcgtaaggctgatgagatctatgaaactgttctgtctgttttcaccctcgcaaaatcgactgggatcccgacttacaaagctgctgaccgcgtagctgaacagcgtattgctgctgtacgaggtatgatgcgtacttggccgcaataccctaacaaggaggca

SEQ ID NO: 86 - DNA, 1047 bp, Artificial Sequence
  Synthetic polynucleotide
atgtcggtgttcgagcattctgaatttgatggccacgaacacgtagccttccatcaggacaaggctagcggtctgaaagcaatcattgctgtccacaatagtaacttagggaacgcgttgggtggttgccgcatgtggccatattcatctgacgaagaagcacttcgtgatgttctccgtctgtccaaaggcatgacttacaaagctgcgatggctggcctgaaacaaggcggtggcaaagcggttatcctgggtaaccctcgaaccgagaagacgccggaaaaaatgctggccatggggaaattcattaacagcctgtccggccagtacatcagcgcagaagactctggtctgactgtggatgatctaaagctgatggctaaagagaccgcctatgtaagcggaatacaggctaaataccacatcaattctgaatctgctgatggtaaccccgcgccgtccacagcatacggcgtttttgtcggtttacgcacttcggttgaacataccatgaactccgacctgaaaaacgttaaggtagcgattcagggtctgggccacgtgggtatgcgtctggccaaacatctttgtaaccaaggggctaaactgtatgtcactgacatccacccggaaaatatcgagaaagcggttaacgaatttagcgcaatagctgttaacccgaacgatatttacgacctggatgtggacgttttcgcgccatgcgccatgggcgctatcctcgatgcagaaaacatcggtcgtctgcgtgtaaaagtgatcgccggcgctgctaataatcagctggcaaaagaggttttcggccagctgctggttgataaaggtatcctatatgcgccggactacgtcatcaacgctggtggtgtgattgacatttaccaccagtcaatcgcatccagtgataaaggactgcgcgatcacattgagaaaatttctgacaccctgttggaaatctaccggcgcgctgaagctcaaggcatcgcaacgaacatcgtagctaaccagattgcggaggaacgttttagcaag

SEQ ID NO: 87 - DNA, 1041 bp, Artificial Sequence
  Synthetic polynucleotide
atggcagtgttcaaccatcctgagtttgatcagcacgaacaagtagttttctgtagcgaccaggaaacgggtctgaaggccatcattgctgtgcactctacacgtttagggccggcggttggcggttgccgcttgtgggactatgcatccgatgaagatgctcttgttgacgtcctccgtctgtcaagaggcatgacttacaaaaatgctatggcgggtctgccactgggcggcggtaaaagtgtaatcattggtaacgctaaaactatcaaatcggaggcactgttcaaggcctttgggcgcatggtccaccgtctgggcggcagctactacagtgcggaagacgttaacatcaccacccatgatattatgcaggtacatcaagaaaccccgttcgtggccggactggagggtaaatctggaaacccgggtccctttactgctctgggcacttatcagggtatcaaagcagcagcgaaacaccagtttggctctgctgacctggctggtaagaccgttgcagtgcagggcttagggtccgtaggtttctacctatgcgaacacctgcataaagaaggcgctaaactcatcgttactgacattaatcaggatgctgttaaccgagcggtggcccaattcggtgctacggccgttggcctgaacgacatatacggtgttgccgcggatatctatgcaccgtgcgctctgggcgctaccataaatgatgacacgatcccgcagctgaaagcgaaagtagtcgctggttgcgctaacaaccagctgaagcgtcctgaacacggtcaaaagctgcgtgactccggcatcctttacgcaccagattatgttatcaacggtggaggcatcatcaatgtggcattcgaaatgaggccgcagggctacaacgcggccgagagcaccgcgaaagttatgcagatttatgatactctgttgcgtattttcgaacgcgctgatgccgaggacaaaccaacttctaccgtcgcagaccagatggctcaggaaattattgcccggggaccgcta

SEQ ID NO: 88 - DNA, 1065 bp, Artificial Sequence
  Synthetic polynucleotide
atggagatcttcaagtatatggaaaaatacgactacgaacaactggtcatttgtcacgataaaaccagtggtctcaaagccatcatcggcatacatgatacgactttagggccggcattgggtggtacccgcatgtggaactataagactgaagaggaagcgattgaagacgctcttcgtctgtcccggggcatgacatacaaagctgccgctgcgggcctgaatctgggcggtggtaaaaccgttatctggggagaccccaaaactcagaagtcagaagagctgtggagagcatttggccgtttcgtacagtctctgaacggacgctacatcactgctgctgatgtgggtaccgttgtggacgatatggactatattcgtcaggaaacgaaacacgttgtaggtgtgagcaaaaccctgggcggttctggcgaccctagcccgaaaactgcgtacggcgtctttcgtggtattcaggcatgcgccaacgaagtttgggggtccgatgacatcacaggtagggttgtagctgtacaaggcgttggtaaagttggttactatctgtgcgaatacctgcacaaagcgggcgctaagctaatcgtttctgatatcgacaaagaagcggtggatcgagtcgttcgtgagttcggcgcacaggctgttggcctggatgaaatttacggagtggaatgcgacatctatagcccaaacgccctgggtgctaccattaatgacgaaactatcccgcagttcaaatgtaaaatcatcgcaggcggtgctaacaaccaactgaaggaagagcgtcatggcgatatcatcaccgaaaaaggtatcatttatgcgccggactacgtcataaacgctggcggtctgatcaacgtagctgacgagcttaaaggatacaacgaagaacgcgcgatgcagtcggttagcaaaatttatgataatatcaaaaaagtcttccagatcgcaaaacgtgataatattccgacgtacaaagcggctgatcgtatggcggaggaacgcattgagaagttgggtagggtacgtaacacttacctgggt

SEQ ID NO: 89 - DNA, 1098 bp, Artificial Sequence
  Synthetic polynucleotide
atgacactggagatctttgaataccttgaaaagtatgactacgagcaagtagtcttctgccaggataaagaaagtggcttgaaagcaattatagccatccacgacactacgctgggtcctgctcagggagggactcgcatgtggacctatgatagcgaagaagctgcgatcgaggacgcattacgtctcgctaaaggtatgacctacaaaaatgcggctgccggcctgaacctgggtggcgcgaagaccgtgatcattggcgatccgcgtaaagacaaatcggaagcgatgttccgggcactgggtcgctatatccagggtctaaacggccgttacattactgctgaagatgttggaaccactgtggatgacatggacatcattcatgaagaaactgattttgttaccgggatctctccatcattcggctcctctggtaaccccagcccggtcaccgcctacggcgtataccgtggtatgaaagctgctgcgaaagaggctttcggtactgacaatctggaaggtaaggttatcgcagttcaaggcgtgggtaacgttgcttatcacctgtgtaaacacctgcatgcagaaggggccaaactgattgttacggacatcaacaaggaggctgttcagcgcgcagtagaagaatttggtgcgtccgctgtagagccgaacgaaatatacggcgttgaatgcgatatttacgcaccgtgcgcgttaggcgctacagtgaacgatgaaactatcccacagctgaaagccaaggttatcgcgggcagcgcaaataaccagctcaaagaagatagacacggcgacatcatacatgaaatgggtatcgtgtatgccccagactacgtcattaacgctggcggtgttatcaacgttgctgatgaactgtatggttacaaccgtgagcgtgctctgaaacgcgtagaatctatttatgataccatcgcgaaagtcatcgaaatctctaaaagggacggcattgctacgtacgttgctgcggaccgtctggcagaagagcgtattgcgagcctgaagaactcccgttcaacctacctgcgcaatggacacgatatcatctctaggcgc

SEQ ID NO: 90 - DNA, 1092 bp, Artificial Sequence
  Synthetic polynucleotide
atggagatcttcaagtatatgaaagaatacgactacgaacaactggtcttttgtcaggatgaacagagtggtctcaaagccattatcgctatacacgatacgaccttagggccggcgttgggcggtactcgcatgtggacctatgcatctgaggacgaagctattgaagacgcacttcgtctggctaaaggcatgacttacaaaaatgcggctgccggtctgaacctgggcggtggcaagacagtaatcatcggagatcctaaaaccgagaaaaacgaagaaatgttccgggcattcggtagatacatccagggcctgaacggccgttacattactgccgaagacgttggtaccactgtgcatgatatggacacgatccacgaagagactgactatgttaccggcatttcccccgcttttggtagctcgggtaacccgtcaccggtgactgcgtatggtgtataccgcggcatgaaagcggcagctatggaagcgttcgggaccgattctctggaaggcaaagttatcgctgtccaaggtgttggcaatgtcgcttacaacctgtgcaagcatttacacgaggaaggtgctcagctgatcgtaactgacattaacaaggaagctgttaaccgcgcggtggagaattttggcgcaaaagccgttgaaaccgaggaaatctactccgttgactgcgatatttacgctccatgtgccctcggagctgtgatcaacgatgaaactatcccacagatcaaagcaaaagttatcgccggtgcggcaaacaaccagctgaaggaaagccgtcatggtgatctgatacacgaaatgggaatcgtgtatacgccggattacgttatcaacgcaggcggtgtaattaacgtagcagatgagctatatggctacaattatgaccgtgcgatgaaacgtgtagaaggcctatacgatacatgcacccgtattttcgaaattgcccgccgagacaatatccctacttatatggcggctgaccgtatggcggaagaacgtatagagaaaatgcgcaaaaccaaatctacattcctgcaaaacgaacaccacattctgagccgtcga

SEQ ID NO: 91 - DNA, 1098 bp, Artificial Sequence
  Synthetic polynucleotide
atgacactggagatctttgaataccttgaaaagtatgactacgagcaagtagtcttctgccaggataaagaaagtggcttgaaagcaattatagccatccacgacactacgctgggtcctgctttagggggcactcgcatgtggacctatgatagcgaagaagctgcgatcgaagatgctctacgtctggcgaaaggtatgacctacaaaaatgcagctgccggtctcaacctgggcggtgcgaagactgttattatcggcgacccccgaaaagacaaatccgaggcaatgttccgtgcgctgggacgctacattcagggtctgaacggcagatacatcaccgctgaagatgtgggtacaaccgttgatgacatggacattatccatgaagaaactgacttcgtgaccgggatctcaccaagctttggctcttctggtaacccgtccccggttacggcatatggcgtataccgcggcatgaaagctgctgcgaaagaggccttcggtactgataacctggaagggaaggtaattgcggttcagggtgtcggtaatgtggcttatcacctctgtaaacatctgcacgctgaaggcgctaagctgattgttaccgatatcaacaaagaggcagtccaaagggccgttgaggaatttggtgcgtcggcagtagaaccgaatgaaatctacggcgttgaatgcgacatttacgccccgtgtgcgctgggtgccacggtcaacgatgaaactatccctcagctgaaagctaaggttatcgctggcagcgccaacaaccagctgaaagaagaccgtcatggagatatcatacacgagatgggtatcgtgtatgcgccggattacgtgatcaacgcagggggcgttattaatgtgcacgacgaattatacggctataaccgtgaacgcgctttgaaacgggttgaatctatttacgatactatcgcaaaagtaatcgaaatcagcaaacgtgatggtattgctacctacgtcgcggctgaccgcttggctgaagagcggatcgcatctttaaagaactcccgtagcacctatctgcgcaacggccatgatatcatatcgcgacgt

SEQ ID NO: 92 - DNA, 1101 bp, Artificial Sequence
  Synthetic polynucleotide
atgatcacggaggtagctaaagcgtcagaactgcataagattgacccagtctttgggcagctatccttcgataaccacgaacaaatcgttttctgcaatgacaaagatacaggcctcaaagccattatcggtatccacaacactgtgttaggcccggctctgggtggtacccgtatgtggaaatataccaacgaatgggaggcacttaatgacgttttgcgcctgtctcgaggcatgactttcaagagtgcaattagcggtctgaacctgggcggaggtaaagcggtgatcatcggcgattccaaagttgacaaaactccggaaatgatgataaagtttggcgaatttattaacagcctgtctggtaaatacatcaccgctgaagatgtaggcaccaccacgcctgacatggatctcatccgcgacgttactccctacgttactggcattagccagtctcgtggtggttcggggaacccgtcccctgtgactgcctatggcgtatacatgggtatgaaagcggctgcaaaataccagttcggttctgataatctggaaggcaaaaaaatcctggtccagggtaccggcaacgttggggaaactctgatcgaccatttaaccaaggagggcgctctggtacaaataaccgatatcaacgaggcaaaactgaaagaaattagccagaaatatggtgcgcagattttcacaggtgaagacatctactccgcgccggttgatatctatgctccgtgtgcccttggcgcaactatcaacgacacgaccgtcaataaaatccaagctaaggtgattgcgggtgccgccaacaaccagctcgctaacgaagagattcacggaaagatcctgaaagaccgtggtatcgcttacgcgccggattttctgatcaacgcaggcggtatcattaatgtgtacgctgaaatcgttgggtatgattctgctgaagctctgcgtcgcactgaaaacatttacaacaccacactggaaatattcaatttcgcagagacgaactccattacaacccatcaggcggccttgagcatcgctcagaaacgtatcgacgataggaaaaaagaaaacgcgaaa

SEQ ID NO: 93 - DNA, 1065 bp, Artificial Sequence
  Synthetic polynucleotide
atgaagatcttcgagtatttggaaaaatacgactacgaacaactggtcatttgtcaggatgaaaccagtggtctgaaagccatcatctgcatacacgatacgactttagggccggcacttggcggtacccgcatgtggaactatgagtgcgaagaagacgcgattctcgacgctctgcgtctggctcggggcatgacttacaaaaatgcagctgcgggtctgaacctaggcggcggtaaaacagtaatcattggtgattctcgtactcagaagtcggaggaactgtttcgcgccttcgggcgttacgttcagtcactgaacggcagatatatcaccgctgaagacgtgggtaccactgtacgcgatatggactgggttcatctggaaagcaactttgtgacgggagttagctcttccggtgcgtccggcgatccctctcctatgaccgcacgtggagtatggaaaggcatgaaagccgctgcaaaagaaatgttcggtgacgatagcctggagggcaaaactatcgctatccaagggcttggccacgttggttactacctggcgaaacatctgcgtgaagaaggtgctaagctgattgtgactgatatccacgaggacgctatcaaacgcgttttaaacgaaatggacgcaactgtcgtggagccggaagagatttttggcgttgatgccgatatctacgcgccatgcgcaatgggtgcggttattaatgacaaaaccatcccgcagttcaaattcaaggttatcgccggtgctgctaacaacgtactgttggaagaccgtcatggcgataaactgcacgaactgggtatcctgtatgctccggattacgtcattaacgcgggaggggtcataaatgttgccgatgaactggaaggctatgactaccagcgtgcactccagaaagttgacacggtttatgacaacgtggctaaagtcctgcaaatcgctaaacagatgaacatcccaacctacaaagccgcagatcgaatggccgaggaacgtattcagaggctgggtcgtattcgctcgaattatctgcgcaaa

SEQ ID NO: 94 - DNA, 1098 bp, Artificial Sequence
  Synthetic polynucleotide
atgacactggagatctttgaataccttgaaaagtatgactacgagcaagtagtcttctgccaggataaagaaagtggcttgaaagcaattatagccatccacgacactacgctgggtcctgctttagggggcactcgcatgtggacctatgatagcgaagaagctgcgatcgaagatgctctacgtctggcgaaaggtatgacctacaaaaatgcagctgccggtctcaacctgggcggtgcgaagactgttattatcggcgacccccgaaaagacaaatccgaggcaatgttccgtgcgctgggacgctacattcagggtctgaacggcagatacgtgaccgctgaagatgttggtacaaccgttgatgacatggacatcatccatgaagaaactgacttcgtgaccgggatttcaccaagctttggctcttctggtaacccgtccccggtcacggcatatggcgtataccgcggcatgaaagctgctgcgaaagaggccttcggtactgataacctggaagggaaggttatcgcggttcagggtgtgggtaatgtagcttatcacctctgtaaacatctgcacgctgaaggcgctaagctgattgtcaccgatatcaacaaagaggcagttcaaagggccgttgaggaatttggtgcgtcggcagtagaaccgaatgaaatctacggcgttgaatgcgacatttacgccccgtgtgcgctgggtgccacggtaaacgatgaaactatccctcagctgaaagctaaggttatcgctggcagcgccaacaaccagctgaaagaagaccgtcatggagatataatccacgagatgggtattgtgtatgcgccggattacgtgatcaacgcagggggcgttatcaatgtggcggacgaattatacggctataaccgtgaacgcgctttgaaacgggttgaatctatttacgatactattgcaaaagtaatcgaaatcagcaaacgtgatggtattgctacctacgtcgcagctgaccgcttggctgaagagcggatcgcatctttaaagaactcccgtagcacctatctgcgcaacggccacgatatcatatcgcgacgt

SEQ ID NO: 95 - DNA, 1068 bp, Artificial Sequence
  Synthetic polynucleotide
atgaacaagttcgactatatggagaaacatggctacgaacaaatggtctacttttacgataaaaccacgggtctgaaagggatcacttgtatacacgatacaactttaggcccggcattgggtggtacccgcattctcaattatgcgtctgaagaagacgccgttcttgactgcctgcgtctggctcggggcatgacttacaaatcggctgctgcgggcctgaacctgggtggtggcaaaaccgtactgatcggagatcccaacgtggtaaagaacgaggcatacttcagagccctgggccgtttcatccagtccctgaacggtcgctatattactgctgaagacgttaataccaacacgaaagatatggactttgttgcaatggaaaccgatcacgtggtcggtctggagagtaaatcaggtaatccttctccgatcacggcgcttggcgcttaccacgggattcgtgctgctatcaaattcgcctttggcgacgacgatgttactaagcgcaccttcgcggttcagggtgcaggtcagactggctattacttgatcaacttcctggtggaaaacaaggctaaaaaaatttacttttcggaaattaacccaaaacatgttgagcgtatgcagaaagaacatccggaagtagaatttgttaaaccggaaaatttcttcgagtgcgatgtggacgtcatctgcccatgtgcactgggtgccgttctcaacgacgaaaccatcccgaaaatcaaagcaaaagtaatcgcgggcactgctaacaacgtcctgctggatgaggatcgccacggtaacatgattaaagaaaaagggatcttgtacgcgccggactttgtgatcaatgctggtggagtgatcaacgttttcaacgaactgggcacctacaatcgtgacaaggttcaacgtgatgtggaaaaaatttatgatcgcctaattgatatattcacaatcgctaaagaagataacatccacactcaggaggctgccaaacgtttcgcgaagatgcgtatggaaactattgggcgcgttcgtagcaactatgtccctagg

SEQ ID NO: 96 - DNA, 1098 bp, Artificial Sequence
  Synthetic polynucleotide
atgacactggagatctttgaataccttgaaaagtatgactacgagcaagtagtcttctgccaggataaagaaagtggcttgaaagcaattatagccatccacgacactacgctgggtcctgctttagggggcactcgcatgtggacctatgatagcgaagaagctgcgatcgaagatgctctacgtctggcgaaaggtatgacctacaaaaatgcagctgccggtctcaacctgggcggtgcgaagactgttattatcggcgacccccgaaaagacaaatccgaggcaatgttccgtgcgctgggacgctacattcagggtctgaacggcagatacatcaccgctgaagatgtgggtacaaccgttgatgacatggacattatccatgaagaaactgacttcgtgaccgggatctcaccaagctttggctcttctggtaacccgtccccggttacggcatatggcgtataccgcggcatgaaagctgctgcgaaagaggccttcggtactgataacctggaagggaaggtaattgcggttcagggtgtcggtaatgtggcttatcacctctgtaaacatctgcacgctgaaggcgctaagctgattgttaccgatatcaacaaagaggcagtccaaagggccgttgaggaatttggtgcgtcggcagtagaaccgaatgaaatctacggcgttgaatgcgacatttacgccccgtgtgcgctgggtgccacggtcaacgatgaaactatccctcagctgaaagctaaggttatcgctggcagcgccaacaaccagctgaaagaagaccgtcatggagatatcatacacgagatgggtatcgtgtatgcgccggattacgtgatcaacgcagggggcgttattaatgtgaacgacgaattatacggctataaccgtgaacgcgctttgaaacgggttgaatctatttacgatactatcgcaaaagtaatcgaaatcagcaaacgtgatggtattgctacctacgtcgcggctgaccgcttggctgaagagcggatcgcatctttaaagaactcccgtagcacctatctgcgcaatggccacgatatcatatcgcgacgt

SEQ ID NO: 97 - DNA, 1098 bp, Artificial Sequence
  Synthetic polynucleotide
atgacactggagatctttgaataccttgaaaagtatgactacgagcaagtagtcttctgccaggataaagaaagtggcttgaaagcaattatagccatccacgacactacgctgggtcctgctttagggggcactcgcatgtggacctatgatagcgaagaagctgcgatcgaagatgctctacgtctggcgaaaggtatgacctacaaaaatgcagctgccggtctcaacctgggcggtgcgaagactgttattatcggcgacccccgaaaagacaaatccgaggcaatgttccgtgcgctgggacgctacattcagggtctgaacggcagatacatcaccgctgaagatgtgggtacaaccgttgatgacatggacattatccatgaagaaactgacttcgtgaccgggatctcaccaagctttggctcttctggtaacccgtccccggttacggcatatggcgtataccgcggcatgaaagctgctgcgaaagaggccttcggtactgataacctggaagggaaggtaattgcggttcagggtgtcggtaatgtggcttatcacctctgtaaacatctgcacgctgaaggcgctaagctgattgttaccgatatcaacaaagaggcagtccaaagggccgttgaggaatttggtgcgtcggcagtagaaccgaatgaaatctacggcgttgaatgcgacatttacgccccgtgtgcgctgggtgccacggtcaacgatgaaactatccctcagctgaaagctaaggttatcgctggcagcgccaacaaccagctgaaagaagaccgtcatggagatatcatacacgagatgggtatcgtgtatgcgccggattacgtgatcaacgcagggggcgttattaatgtgatggacgaattatacggctataaccgtgaacgcgctttgaaacgggttgaatctatttacgatactatcgcaaaagtaatcgaaatcagcaaacgtgatggtattgctacctacgtcgcggctgaccgcttggctgaagagcggatcgcatctttaaagaactcccgtagcacctatctgcgcaacggccacgatatcatatcgcgacgt

SEQ ID NO: 98 - DNA, 1044 bp, Artificial Sequence
  Synthetic polynucleotide
atgaacgtgttctcggatactgcgtttgacggccatgaggaagtagttttcgccagcgacccggatacgggtctgaaggctatcattgctgtgcacaatacaaacttagggccatccttgggtggttgccgcatgtggccctatgcatctgaacaggaagcaatccacgacgttcttcgtctatcacggggcatgacttacaaatctgctctggcgaacctccctctgggcggcggtaaaagcgtcattatcggtgatccgcgttcccaaaaaaccccggagctgttccgcgccgtagggcgtgcggttgaacgtgttggcggcagatacatagtggctgaagacgtcggtacctctccggaggatatggaacagatcgctagtcagaccaaacatgtaggaggcatcaacgatggtaaagacccggcacgtactggtgatcctagtccgtttacggcatatggcgttttcatcggactgaaggaagctgtgcgctttaaaaatggtcacgacgacctggcagggctgcgcgttgcggttcagggtctgggtaacgtaggctaccatctctgtcgtatgctgcactccgccggcgctaggctggttgtcagcgatcttaacgcgaacagcgtaaatcgagctgttgaggaatttggcgcgaccgccgtgtctactgacgaaattctgttcatcgacgcggatattctggctccatgcgctctgggtggggttgtcaacgatcgttcgattgacaaaatccgtgcacgtatcattgcaggcgccgccaacaatcaattggaagccgatcgccacggtgagatgctacgcgaagctggcatcctctacgcacccgactacgtgataaacgcgggtggtgtcgttgaggtgtattactgtcgcgaaggccgtccggtttcagaaactaacaagcatatcgaaggtatagctgctaccgtacgtgagatcttcgaaagagcagatcgtcagaacctgtctaccggcttcgttgctgaccgtctggctgaagagcgcttcggtaaacgc

SEQ ID NO: 99 - DNA, 1098 bp, Artificial Sequence
  Synthetic polynucleotide
atgacactggagatctttgaataccttgaaaagtatgactacgagcaagtagtcttctgccaggataaagaaagtggcttgaaagcaattatagccatccacgacactacgctgggtcctgctttagggggcactcgcatgtggacctatgatagcgaagaagctgcgatcgaagatgctctacgtctggcgaaaggtatgacctacaaaaatgcagctgccggtctcaacctgggcggtgcgaagactgttattatcggcgacccccgaaaagacaaatccgaggcaatgttccgtgcgctgggacgctacattcagggtctgaacggcagatacatcaccgctgaagatgtgggtacaaccgttgatgacatggacattatccatgaagaaactgacttcgtgaccgggatctcaccaagctttggctcttctggtaacccgtccccggttacggcatatggcgtataccgcggcatgaaagctgctgcgaaagaggccttcggtactgataacctggaagggaaggtaattgcggttcagggtgtcggtaatgtggcttatcacctctgtaaacatctgcacgctgaaggcgctaagctgattgttaccgatatcaacaaagaggcagtccaaagggccgttgaggaatttggtgcgtcggcagtagaaccgaatgaaatctacggcgttgaatgcgacatttacgccccgtgtgcgctgggtgccacggtcaacgatgaaactatccctcagctgaaagctaaggttatcgctggcagcgccaacaaccagctgaaagaagaccgtcatggagatatcatacacgagatgggtatcgtgtatgcgccggattacgtgatcaacgcagggggcgttattaatgtgctggacgaattatacggctataaccgtgaacgcgctttaaaacgggttgaatctatttacgatactatcgcaaaagtaatcgaaatcagcaaacgtgatggtattgctacctacgtcgcggctgaccgcttggctgaagagcggatcgcatctttaaagaactcccgtagcacctatctgcgcaacggccacgatatcatatcgcgacgt

SEQ ID NO: 100 - DNA, 1065 bp, Artificial Sequence; identical to SEQ ID NO: 11
  Synthetic polynucleotide

SEQ ID NO: 101 - DNA, 1098 bp, Artificial Sequence
  Synthetic polynucleotide
atgacactggagatctttgaataccttgaaaagtatgactacgagcaagtagtcttctgccaggataaagaaagtggcttgaaagcaattatagccatccacgacactacgctgggtcctgctttagggggcactcgcatgtggacctatgatagcgaagaagctgcgatcgaagatgctctacgtctggcgaaaggtatgacctacaaaaatgcagctgccggtctcaacctgggcggtgcgaagactgttattatcggcgacccccgaaaagacaaatccgaggcaatgttccgtgcgctgggacgctacattcagggtctgaacggcagatacatcaccgctgctgatgtgggtaccactgttgacgatatggacatcattcatgaagagacggatttcgttaccggcatctcaccatcttttggttcttctggcaacccgagcccggtaactgcatatggggtgtatcgtggtatgaaggctgccgccaaagaagcgttcggcactgacaacctggaaggtaaagttatcgctgtacagggtgtcggcaatgttgcttaccacctgtgtaaacatctgcacgctgagggtgctaaactgattgtcactgacatcaacaaggaagcggtgcaaagggcagttgaagagttcggagcaagcgctgttgaaccgaacgaaatttacggcgtggaatgcgatatctatgcgccgtgcgccctgggtgccaccgttaatgacgaaaccatcccacagctgaaagcaaaagtaatcgcaggctccgctaacaaccagctaaaagaagaccgtcacggagatatcatccatgaaatgggtatcgtatacgcgccggactacgttataaacgctggcggtgtgattaacgtagctgatgagctgtacggctataaccgtgaacgcgcgttaaaacgtgttgagtctatttatgataccatcgccaaagtcatcgaaatctcgaaacgtgatggtattgccacgtacgttgcggctgatcgcctcgcggaggaacgtattgcatcccttaaaaacagccgttcgacatacctgcgcaatggacacgacataatcagtcgtcgc

SEQ ID NO: 102 - DNA, 1098 bp, Artificial Sequence
  Synthetic polynucleotide
atgacactggagatctttgaataccttgaaaagtatgactacgagcaagtagtcttctgccaggataaagaaagtggcttgaaagcaattatagccatccacgacactacgctgggtcctgctttagggggcactcgcatgtggacctatgatagcgaagaagctgcgatcgaagatgctctacgtctggcgaaaggtaccacttacaaaaatgcagctgccggtctcaacctgggcggtgcgaagaccgttattatcggcgacccccgaaaagacaaatccgaggcaatgttccgtgcgctgggacgctacattcagggtctgaacggcagatacatcaccgctgaagatgtgggtacgactgttgatgacatggacattatccatgaagaaaccgacttcgtgactgggatctcaccaagctttggctcttctggtaacccgtccccggttacggcatatggcgtataccgcggcatgaaagctgctgcgaaagaggccttcggtaccgataacctggaagggaaggtaattgcggttcagggtgtcggtaatgtggcttatcacctctgtaaacatctgcacgctgaaggcgctaagctgattgttactgatatcaacaaagaggcagtccaaagggccgttgaggaatttggtgcgtcggcagtagaaccgaatgaaatctacggcgttgaatgcgacatttacgccccgtgtgcgctgggtgccacagtcaacgatgaaactatccctcagctgaaagctaaggttatcgctggcagcgccaacaaccagctgaaagaagaccgtcatggagatatcatacacgagatgggtatcgtgtatgcgccggattacgtgatcaacgcagggggcgttattaatgtggcggacgaattatacggctataaccgtgaacgcgctttgaaacgggttgaatctatttacgatactatcgcaaaagtaatcgaaatcagcaaacgtgatggtattgctacctacgtcgcagctgaccgcttggctgaagagcggatcgcatctttaaagaactcccgtagcacctatctgcgcaacggccacgatatcatatcgcgacgt

SEQ ID NO: 103 - DNA, 1092 bp, Artificial Sequence
  Synthetic polynucleotide
atgatcttcgacaagatggttgagtttgattacgaacagttagtgttctgccatgacgaaacgtccggccttaaagcaattatctgtattcacgatactacactcggtccggcgctgggtggctgccgcatgtggaattatgaaaccgaagaggaagctatcgaagatgtattgcgtctggcccgtgggatgacttacaaaaacgctgccgctggtctgaacctgggcggcggtaaaaccgtcgttatcggtgacgcaaaaaaggacaaaagtgaggcgtttttccgggcgctgggacgctatgtgaacagcctgaacgggcgttacatcaccgctgaagatgtaggcactaccgttgcagacatggatctgatttaccaagagaccccatatgtgtgtggcatgtcggaatcttacggtactggtggtaatccgtctccgatgactgctttcggcgtctacatggcaatgaaacgaaccgccaaagaagctttcgacgacgatagcctggaaggccgtacgattgcggttcagggtgttggcaacgtatcctattcactatgccgccacctccatgaggaaggggctaaactggtagttactgatatctctcaggaagctatagaccgtgcggtcaacgattttggcgcaaaggcggttggtatcgaagaaatctacgacgtggaggctgacatttttgccccatgcgccctgggaggtgttctcaatgatgagactatccctgctctgaaggttaaagctgtgtgcggcagcgctaacaaccaactgctggaagaagacaaacacggcgaactgctgcaacagcgtggaattgtttacgcaccggactatgtggtaaactgtggtggggtgatcaacgttgcggatgaactgcaaggctataataaagagcgtgccaaatctaaggttgaaggtatctacgaccagatggataaaatcttcaacattgctcgccgcgatcgtataacccccgcggttgccgctgataggctggcagaagaacgcatcgaatctatgatgcgtgtaaaatccacattctctcagaacgagatcaccccgttaagccgacgt

SEQ ID NO: 104 - DNA, 1122 bp, Artificial Sequence
  Synthetic polynucleotide
atggtagagacgaacgttgaagcgcgctttagtattttcgaaacaatggccatggaagactacgaacaggtcgtgttctgtcacgataaagtgtcgggtctgaaggctataatcgcaattcatgataccaccttaggcccagctctgggtgggctgcgtatgtggaattatgcatctgacgaggaagcgctcatcgatgctttgcgtcttgccaaaggcatgacttacaaaaacgctgctgcgggtctgaacctgggcggtggcaaagcagttatcatcggtgacgcaaagactcaaaaatcagaggctctgtttcgagcgttcgggcgctacgtacagtccctgaacggtcgttatatcaccgctgaagacgttaatactaccgtcgcagatatggactacatccacatggaaactgatttcgttaccggcgtatctcctgcttttggctccagcggaaacccgagcccggtgacggcctatggtgtttaccgtggcatgaaagcggcggcgaaggaagtatacggtactgatagcctcggcggtaaaactattgccattcagggtgttggcaacgtcgctttcaatctgtgccgccacctgcatgaagagggcgctaaactgatcgtgaccgacatcaaccaagacgccttacgtagggcagaggaagcgtttggtgccctggttgttggtccggacgaaatttacggcgtcgaagcggatatcttcgcaccctgcgctctcggtgccactctgaacgatgaaaccattccgcagctgaaggtaaaaatcattgctggtgctgcaaacaatcagttgaaagaggatcgccacggtgatatgctacaggaacgtggaatcctgtacgctccggacttcgttattaacgcgggcggcgttatcaacgtggccgacgaactggatggttataaccgtgaacgcgctatgaaaaaagttgaactggtatatgatgctgtttctaaagtgatcgagatcgccaagcgtgaccatctgccgacgtaccgtgctgcggaaaaaatggcggaagaacgcatcgcaacaatgggtagcgcgcggagccagttcttacgtcgagataaaaacattctgggctcccgtggc

SEQ ID NO: 105 - DNA, 1158 bp, Artificial Sequence
  Synthetic polynucleotide
atgacagacgtgcagactgctagcgcaacccaccccgcgcctggggtcctctcccgcatcttccgtacggaacaagatggtgccccgggcgacggccatgagcaggttgtactgtgccacgatcgttcatcgggtcttaaggctataattgcgatccattctactgctctgggtccagcattgggcggaacccgatttttcccgtatttaactgaagaagaagccctggaggacgctctgcggctgtctcgtggtatgtcctacaaaaacgcactggcgggcctggatctgggtggcgggaaagcagttatcattggtgacccgggcaaagataagaatgaagctatgttacgcgcttacggtcgttttgtagagagcctacgtggccgctatgtgaccgcgtgtgacgtgggtacctacgtccaggatatggacgttattgctcgtgaaactacgttcgttaccggccgcagtccggaacacggtggtgcgggcgattctagcatcctgacagcattcggcgtgtttcagggtatgcgtgcgtctgcccaagctcgctggggccagcctactctgcgtggtcgccgtgtaggagttagcggtgttggcaaagtcggtcattacctggtaggccacctggttgctgacggcgctcacgtggtagttaccgacgtttctgaagcagcagttaaccgggtgagggctgcgcacccggatgtggaagtcgtcgcggatactgctgccttgctggctgctgcattagacgtatatgccccatgcgcactcggtggagcactagacgatcacaccgttggagcactaggtgctgctgggacctccctggtatgcggggccgcgaacaatcagcttgcgcatccgggcgttgagaaagatctggcagatcgaggtattctgtacgctccagactatctggttaactctggcggtgtaatccaagttgcggacgaaatccagggtttcaacttcgaacgcgctaaaaacaaagctactaagatcttcgatactactctggagatttttacgcgtgctaccgcagatggcgttcctccggcggtggcggccgaccgtctggcagaaaaacgcatgcgtgaaatctccagcctaaggaccatcctcctgccgggcgctcgtggtaac

SEQ ID NO: 106 - DNA, 1098 bp, Artificial Sequence
  Synthetic polynucleotide
atgacactggagatctttgaataccttgaaaagtatgactacgagcaagtagtcttctgccaggataaagaaagtggcttgaaagcaattatagccatccacgacactacgctgggtcctgctttagggggcactcgcatgtggacctatgatagcgaagaagctgcgatcgaagatgctctacgtctggcgaaaggtatgacctacaaaaatgcagctgccggtctcaacctgggcggtgcgaagactgttattatcggcgacccccgaaaagacaaatccgaggcaatgttccgtgcgctgggacgctacattcagggtctgaacggcagatacatcaccgctgaagatgtgggtacaaccgttgatgacatggacattatccatgaagaaactgacttcgtgaccgggatctcaccaagctttggctcttctggtaacccgtccccggttacggcatatggcgtataccgcggcatgaaagctgctgcgaaagaggccttcggtactgataacctggaagggaaggtaattgcggttcagggtgtcggtaatgtggcttatcacctctgtaaacatctgcacgctgaaggcgctaagctgattgttaccgatatcaacaaagaggcagtccaaagggccgttgaggaatttggtgcgtcggcagtagaaccgaatgaaatctacggcgttgaatgcgacatttacgccccgtgtgcgctgggtgccacggtcaacgatgaaactatccctcagctgaaagctaaggttatcgctggcagcgccaacaaccagctgaaagaagaccgtcatggagatatcatacacgagatgggtatcgtgtatgcgccggattacgtgatcaacgcagggggcgttattaatgtggcggacgaaaactacggctataaccgtgaacgcgctttaaaacgggttgaatctatttacgatactatcgcaaaagtaatcgaaatcagcaaacgtgatggtattgctacctacgtcgcagctgaccgcttggctgaagagcggatcgcatctttaaagaactcccgtagcacctatctgcgcaatggccacgatatcatatcgcgacgt

SEQ ID NO: 107 - DNA, 1095 bp, Artificial Sequence
  Synthetic polynucleotide
atggagatcttcacatatttggaaaagtacgactacgaacaactgctcttttgtcaggataaacagagtggtctgaaagccattatcgctatacacgatacgactttagggccggcgcttggcggtacccgcatgtggacctatgaatctgaggaagctgcaattgaagacgcactgcgtctggctaaaggcatgacttacaaaaatgcggctgccggtctgaacctgggcggtggcaagactgtaatcatcggagaccctcgtaaagataaaaacgacgagatgttcagagcattcggtcggtacatccagggcctgaacggccgttacattaccgccgaagatgtcggtaccactgtggctgacatggacctgatccatgaagaaactgattttgttaccggcatttcccccgcgttcggtagctcgggtaacccgtcaccggttaccgcatttggtgtgtatcagggcatgaaagctgcggcgaaagaagcgttcgggactgactctctggaaggcaaaacagtagctgttcaaggtatcggcaatgtcgcttttacgctattgcagtatttacacgaggaaggtgctaagctgatcgttactgatattaacaaggaggctgttcagcgcgcagtggagaaattcggcgcacgcgccgtcaacaccgacgaaatctacggtgtagagtgcgatatttacgctccatgcgccctcggagctgtcatcaatgatcagactatctctcagatcaaagcaaaagttatcgctggtagcgcaaacaaccaactgaaggatccgcgtcatggtgatcagatacacgaaatgggcatcgtgtatgcgccggactacgttatcaacgcgggcggtgtaattaacgtagcagatgaactatatgggtacaatcgtgaacgtgcgatgaaaaaagttgaaggagtttacaacacgatcgaaaaagttattgaaattgccaaacgagacggcatccctacctatctggcggcggaccgtatggcagaagaacgtataaaacgtatgcgcaactcccgctctcagttcctgcaaaacgaaaagcacattctgaaccgccggaaa

SEQ ID NO: 108 - DNA, 1095 bp, Artificial Sequence
  Synthetic polynucleotide
atgctcttcgagacaatggttcaggacggttacgaacaagtcgtgttttgccatgataaggcgtccgggttgaaagccattatcgcaatccacgacactacgcttggtccggctctgggcggctgtcgcatgtggccctatgctaccgaagaagaggcactgcacgatgtattacgtctgtcacgtggcatgacttacaaaaatgctgcggccggtctaaacattggtggcggaaaaaccgttatcatcggtgatccgcgcactgacaaatcggaaaccctgttccgggctctgggcaggtatgtggaaagcctgaacggacgttacattatagcggaggacgtaggcactaccgaagatgacatgaactttatctacaatgaaaccaactatgttacgggtagtactgcgggtgcaggtagctccggcaacccttctccaaaaaccgccctcgggatctactacgctatgaagcgcactgctaaagaagtattcggctctgatagcctggcggacaaaaaggtgtctgttcagggggttggcaacgtctcttataccctgtgcgaacttctgcatgcagagggtgctaaactgattgtgactgatatcaacgaagttgctgtagcccgtgcagttacgaacttgaacgccactgctgtgggtatcgacgagatttatgatgtcgacgctgatatcttcgcgccgtgcgcactgggcgcgattctgaatgacgataccatccagcgtctgcgtgtaaaagctatctgcggttccgctaacaaccagctgatggatctggaaaaacacggccaaatgttggaggcgcgcggtatcctatacgctccggactacattgtcaacagcgggggtgtgatcaatgttgctgacgaactgtcaggttacaacgaagcacgtgccataaaacaggtaaaggaaatctacaatcagattggtaaagtttttgagatcgccaaaacgaaaaacattatccctgctatcgcagcagacgaactggcggaacaacgtattgcgcaggttaaagctatgcgctctaacttcctgcaaacagaacactcttctatcagccggaagtcc

SEQ ID NO: 109 - DNA, 1071 bp, Artificial Sequence
  Synthetic polynucleotide
atgggcatcttcgagaaaatggaacagcatgggtatgaacaactggtcttttgtcacgacccggccagtggtctcaaggcaattatctgcatacacgatacgaccttaggcccagcgttgggtggtactcgcatgtggccctacgaatgcgaggaagatgctattactgacgttgtacgtctagctcggggcatgacctacaaaaatgcagctgcgggtcttaacctgggcggaggtaaagcggtgatcatcggcaactctcgtaccgacaaatcggaagctctgttccgcgcctttgggcgtttcgttcagtcactgaacggtagatatatcacagcagaagatgtaggtactactgtggaggatatggaacacattcgtatggaaacctcccatgttgtaggcctgggaggtatggctaggagctctggcgacccttccccggttacggcttacggcgtttggaagggtatgaaagcctgcgcagctgaggtctggggcaccgacagcctgcgcgcaaaaacggtggcggttcagggtctgggtcacgttggctacggtctgtgtcgtcacctgtatgaagaaggcgcaaacttgatcgtaactgatatcaatgaagaaaacgtccgccgtgttgtggctgaatttggtgctcgcagcgcggcaccggatgaaatttacggcgtcgaatgcgacatcttcgcgccgtgtgctctgggtgccattatcaacgatgctaccctcccgcgtctgaaatgccgtatagttgcaggtgcggcgaacaaccaattaaaggaggctcgccatggcgagcttctgcgtgacaaaaaaatcctgtatgctccggacttcatcattaacgcgggcggggtaatcaatgttagtgacgaactgcgtgagggaggctacaaccgcgagcgtgctctgaagcaggtagatggtatatacgatattatggaacaggtaatcgccatctctaaacgtgatggtatccctacttacaaagctgccgacattctggctgaaagcagagtggccttaatcggcaaagttcagaaaactctgctgcca

SEQ ID NO: 110 - DNA, 1134 bp, Artificial Sequence
  Synthetic polynucleotide
atgggcgtgacgaccgttactgacgtacgtcagaccagccctagtaatgagggtgtcctggcgaaactctttcgatccgaacaagggggtcacgaacaggtagttttatgccaggatcgtgctactggcctgaaggccgtgattgcagttcattcgacagctttgggtccggcacttggcggcactcgcttcttcccatatgcttctgatgaagaagctgttgacgatgcgctgaacctggcgcgcggtatgtcttacaaaaacgctctggcaggactggacctgggtggcggcaaagcggtaatcatcggcgaccccgataccctgaaaagcgaggaactgctactggcttacggtagattcgttgcctcactgggtggtcgttatgtgaccgcatgtgacgtgggaacgtacgtctctgacatggatgttatcgctcgtgaaaaccgctggacaaccggccgtagcccgcagaacggtggcgccggtgactcctcagtcctgactgcgtttggggttttccagggcatgcgtgcggctgcgcaagcccagtggggcgaatccactttaaagggtcgccgtgtcggtgtagcaggtgtgggtaaagttggccaccatttagtagagcacctggttgaggatggtgcagaagttgtcataaccgacgtaagggctgaagccgtagaacgtattatcgcacggcatccggatgtgactgcggttcacgatgcggaagttcttgttcgtagcccgctggacgtttacgctccttgcgctctgggccacgccttggatgacgctaccgtgggagctctgactgcaacggtcgtatgcggtgctgctaataaccagctcgcgcacccgggggttgagaaagatctggctgaccgcggcatcctttacgcgccggattatgtcgtgaacgctggcggggttattcaggttgcggatgaacttcatggtttcgattttgacagagcaaaagctaaagctaccaaaatcttcgacactactctggctatttttgccagagcgaaggctgatggcgtaccacctgcggtagctgccgatcgtctggcggaacagcgcatggctgaacgcactccggcagcagactggctgcgtgtccaaagc

SEQ ID NO: 111 - DNA, 1098 bp, Artificial Sequence
  Synthetic polynucleotide
atgacactggagatctttgaataccttgaaaagtatgactacgagcaagtagtcttctgccaggataaagaaagtggcttgaaagcaattatagccatccacgacactacgctgggtcctgctactgggggcacccgcatgtggacctatgatagcgaagaagctgcgatcgaagatgctctccgtctggcgaaaggtatgacttacaaaaatgcagctgccggtttaaacctgggcggtgcgaagaccgttattatcggcgacccccgaaaagacaaatccgaggcaatgttccgtgcgctgggacgctacattcagggtctgaacggcagatacatcaccgctgaagatgtgggtacgactgttgatgacatggacattatccatgaagaaaccgacttcgtgactgggatctcaccaagctttggctcttctggtaacccgtccccggttacggcatatggcgtataccgcggcatgaaagctgctgcgaaagaggccttcggtaccgataacctagaagggaaggtaattgcggttcagggtgtcggtaatgtggcttatcacctctgtaaacatctgcacgctgaaggcgctaagctgattgttactgatatcaacaaagaggcagtccaaagggccgttgaggaatttggtgcgtcggcagtagaaccgaatgaaatctacggcgttgaatgcgacatttacgccccgtgtgcgctgggtgccacagtcaacgatgaaactatccctcagctgaaagctaaggttatcgctggcagcgccaacaaccagctgaaagaagaccgtcatggagatatcatacacgagatgggtatcgtgtatgcgccggattacgtgatcaacgcagggggcgttattaatgtggcggacgaattatacggctataaccgtgaacgcgctttgaaacgggttgaatctatttacgatactatcgcaaaagtaatcgaaatcagcaaacgtgatggtattgctacctacgtcgcagctgaccgcttggctgaagagcggatcgcatctttaaagaactcccgtagcacctatctgcgcaacggccacgatatcatatcgcgacgt

SEQ ID NO: 112 - DNA, 1107 bp, Artificial Sequence
  Synthetic polynucleotide
atgatgagcttcgagcgtttgtacaaggatggccatgaagaagtgatttttttctcggacccgtcttgcaatctgaaagccatcgtcgctatacacaacacgaccttagggccagcgcttggtggtactcgcatgtggccctatgcatctgaagaggaagctatcaacgacgttctccgtctgtccaaaggcatgacttacaaagcagctgtatcaggtctgaacctgggcggcggtaaagcggttatcattggtgatcctgaaaaagacaagagcgaggccctgttccgaagttatgggcgctttctggaatccctgaacggcagatacatcacagctgaagatgtaaatattggtgtgcaggatatcgaacacgttttcaccgaaaccggcaacgtatgtggagttgcgaaaatccatggaggctctggtaacccgtctccatacactgctaagggcgtttttcgtggtatcgaggcagcatgcatgaaagtctatggtgaccgcagcccgaaaggcaaaacggtggcgcttcaaggtgcaggttccgttggccgttacctggctaaattcctggacgaagctggtgccaaggttgtggtctgtgatattaacgaacgtaacatccagctgttaaaagaggctgtgccggctgtagaggtagttggcgtgaatgatatttacgacgttgattgcgacatctatgcgccgtgcgccctgggtgcaactgtgaacgatgataccattgaccgtctgaaatgtaaaatcgttgcaggtgcggcgaacaaccagttagctgaagatcggcacggcgaaatcctgcgccaaaaaggaattttgtacgcgccggactacctgataaacgctggcggtctgatgaatgtctctatcgagttcgaaggctggagcgattctaagagctctcgtatggttgacactatttatgacaccacactcaaaatcttcgccatctccgatgaacaggatatccccgtaaataaagcggctgacgttctggcggaatcgcgtattgagagtatccgtaacatcaacggcaaatatctgggtaacctggggcacaggtttccgggtcgcaagactcgcaac

SEQ ID NO: 113 - DNA, 1095 bp, Artificial Sequence
  Synthetic polynucleotide
atggagctgttcaagtatatggaacagtacgactacgaacaactactttttgtccaggataggcagagtggtctgaaagccatcattgctatacacgatacgaccttagggccggcgttgggcggtactcgcatgtggacctatgaatctgaggacgctgcaatcgaagacgcactccgtctggctaaaggcatgacttacaaaaatgcggctgccggtctgaacctgggcggtggcaaaacagtaatcattggagatcctcgtaaggacaaaaacgaagagatgttccgcgcattcggtcggtacatccagggcctgaacggccgttacatcactgccgaagatgttggtaccaccgtggctgacatggacatcattcatgaagaaactgattatgttaccggcatttcccccgcgtttggtagctcgggtaacccgtcaccggtgactgcattcggtgtatatcgtggcatgaaagctgcggcgaaagaagcgtttgggactgactctctggaaggcaaagttatcgctgtccaaggtgttggcaatgtcgctttcaacctgtgtaagcacttacatgaggaaggtgctcagctgatcgtaactgatattaacaaggattctgttcagatggcagtggagcaatttggcgcaaaagctgttgacccaaacgaaatctacggtgttgactgcgatatttacgctccgtgcgccctcggagctacgatcaatgattacaccatccctcagctgaaagcaaaagttatcgccggtgcggcaaacaaccagctgaaggaaacccgccacggtgatgctatacacgaaatgggcatcgtgtatgcgccggattacgttatcaacgcaggcggtgtaatcaacgtagcagacgagctctatgggtacaatcaggaacgtgcgttgaaaaaagtggaactgatttataacaacatcgaacgtgttattgaaattgccaaacgagatggtatcccaacctacatggcggccgaccgtatggccgaggaacgtatagaaaaactgaaaaatagccgctcccagttcctgatgaacggccgtcatatcttaaaccgccgccgg

SEQ ID NO: 114 - DNA, 1098 bp, Artificial Sequence
  Synthetic polynucleotide
atgacactggagatctttgaataccttgaaaagtatgactacgagcaagtagtcttctgccaggataaagaaagtggcttgaaagcaattatagccatccacgacactacgctgggtcctgctttagggggcactcgcatgtggacctatgatagcgaagaagctgcgatcgaagatgctctacgtctggcgaaaggtatgacctacaaaaatgcagctgccggtctcaacctgggcggtgcgaagactgttattatcggcgacccccgaaaagacaaatccgaggcaatgttccgtgcgctgggacgctacattcagggtctgaacggcagatacatcaccgctgaagatgtgggtacaaccgttgatgacatggacattatccatgaagaaactgacttcgtgaccgggatctcaccaagctttggctcttctggtaacccgtccccggttacggcatatggcgtataccgcggcatgaaagctgctgcgaaagaggccttcggtactgataacctggaagggaaggtaattgcggttcagggtgtcggtaatgtggcttatcacctctgtaaacatctgcacgctgaaggcgctaagctgattgttaccgatatcaacaaagaggcagtccaaagggccgttgaggaatttggtgcgtcggcagtagaaccgaatgaaatctacggcgttgaatgcgacatttacgccccgtgtgcgctgggtgccacggtcaacgatgaaactatccctcagctgaaagctaaggttatcgctggcagcgccaacaaccagctgaaagaagaccgtcatggagatatcatacacgagatgggtatcgtgtatgcgccggattacgtgatcaacgcagggggcgttattaataacgcggacgaattatacggctataaccgtgaacgcgctttgaaacgggttgaatctatttacgatactatcgcaaaagtgatcgaaatcagcaaacgtgatggtattgctacctacgtagcagctgaccgcttggctgaagagcggatcgcatctttaaagaactcccgtagcacctatctgcgcaatggccacgatatcatatcgcgacgt

SEQ ID NO: 115 - DNA, 1116 bp, Artificial Sequence
  Synthetic polynucleotide
atgccaacgctggagaaaatgtactcaatgggccatgaagaagtggtcttctatgcggacccgacttgcaatctccgcgccatcgtagctatacacaacacaattttagggccggcattgggtggtacccgtatgtggccttacaagtctgaagatgaagctcttgaggacgttctgcgtctgtcgaaaggcatgacttataaagcatccgtttctggtctgaacctgggcggcggtaaagcggtcatcatcggtgatcccgaaaaagacaagagcgaggctctgtttcgaagcttcgggcgcctggtagaatccctgaacggcagatacattaccgcagaagatgttaatatcaaagtggaggatattgaacacatctttactgaaaccaacaacgtatgtggagttgcgatcccgcatggaggctctggtaacccagctccttacaccgctctgggcgttttcaagggtatcgaggccagttgcttaaaactctatggtgaccgtagcgtgaaaggcaaagtggttgcacttcagggtgcgggtttcgttggccgtcacctgggtgaactgctgtcccaagctggcgccaaggtttacgtcgctgacattaacgaaaaaaacatcaaactgtttctggaaatggtgccgaatgccgaggtagtagcagcggatgctatttacggcgttaaatgcgacatctatgcaccgtgtgctctgggtgccactgtgaacgatcagaccgttgaaaaactgaaatgcaagatagttgcaggtgcggccaacaaccagttagctgaaccgcgccacggtgacattctgcgttctcgcggcatcctatacgctccggattatctgatcaacgcgggcgggctgatgaatgttagcatcgaatttgagggatggtccgactccaaggctcgtcggatggttgataccatttacgatactactctggaaatcttccgtatcgcggacaaaaataacattaccacgtacaaagcagctgatatgtgggctgaaaacaggatcgaatctattcgccgtatcggtagccgttatatgggcgtcagtcaacatcgcttcccggggcgtaaacgtcgcaaccctaacggc

SEQ ID NO: 116 - DNA, 1098 bp, Artificial Sequence
  Synthetic polynucleotide
atgacactggagatctttgaataccttgaaaagtatgactacgagcaagtagtcttctgccaggataaagaaagtggcttgaaagcaattatagccatccacgacactacgctgggtcctgctttagggggcactcgcatgtggacctatgatagcgaagaagctgcgatcgaagatgctctacgtctggcgaaaggtatgacctacaaaaatgcagctgccggtctcaacaagggcggtgcgaaaactgttattatcggcgacccccgaaaagacaagtccgaggcaatgttccgtgcgctgggacgctacattcagggtctgaacggcagatacatcaccgctgaagatgtgggtacaaccgttgatgacatggacattatccatgaagaaactgacttcgtgaccgggatctcaccaagctttggctcttctggtaacccgtccccggttacggcatatggcgtataccgcggcatgaaagctgctgcgaaagaggccttcggtactgataacctggaagggaaagtaattgcggttcagggtgtcggtaatgtggcttatcacctctgtaaacatctgcacgctgaaggcgctaagctgattgttaccgatatcaacaaagaggcagtccaaagggccgttgaggaatttggtgcgtcggcagtagaaccgaatgaaatctacggcgttgaatgcgacatttacgccccgtgtgcgctgggtgccacggtcaacgatgaaactatccctcagctgaaagctaaggttatcgctggcagcgccaacaaccagctgaaagaagaccgtcatggagatatcatacacgagatgggtatcgtgtatgcgccggattacgtgatcaacgcagggggcgttattaatgtggcggacgaattatacggctataaccgtgaacgcgctttgaagcgggttgaatctatttacgatactatcgcaaaagtaatcgaaatcagcaaacgtgatggtattgctacctacgtcgcagctgaccgcttggctgaagagcggatcgcatctttaaaaaactcccgtagcacctatctgcgcaacggccacgatatcatatcgcgacgt

SEQ ID NO: 117 - DNA, 1098 bp, Artificial Sequence
  Synthetic polynucleotide
atgacactggagatctttgaataccttgaaaagtatgactacgagcaagtagtcttctgccaggataaagaaagtggcttgaaagcaattatagccatccacgacactacgctgggtcctgctttagggggcactcgcatgtggacctatgatagcgaagaagctgcgatcgaagatgctctacgtctggcgaaaggtatgacctacaaaaatgcagctgccggtctcaacctgggcggtgcgaagactgttattatcggcgacccccgaaaagacaaatccgaggcaatgttccgtgcgctgggacgctacattcagggtctgaacggcagatacatcaccgctgaagatgtgggtacaaccgttgatgacatggacattatccatgaagaaactgacttcgtgtcagggatctctccaagctttggctcttccggtaacccgtctccggttacggcatatggcgtataccgcggcatgaaagctgctgcgaaagaggccttcggtaccgataacctggaagggaaggtaattgcggttcagggtgtcggtaatgtggcttatcacctctgtaaacatctgcacgctgaaggcgctaagctgattgttactgatatcaacaaagaggcagtccaaagggccgttgaggaatttggtgcgagcgcagtagaaccgaatgaaatctacggcgttgaatgcgacatttacgccccgtgtgcgctgggtgccacggtcaacgatgaaactatccctcagctgaaagctaaggttatcgctggctcggccaacaaccagctgaaagaagaccgtcatggagatatcatacacgagatgggtatcgtgtatgcgccggattacgtgatcaacgcagggggcgttattaatgtggcggacgaattatacggctataaccgtgaacgcgctttgaaacgggttgaatccatttacgatactatcgcaaaagtaatcgaaatcagcaaacgtgatggtattgctacctacgtcgcagctgaccgcttggctgaagagcggatcgcatctttaaagaactctcgtagcacctatctgcgcaacggccacgatatcatatcgcgacgt

SEQ ID NO: 118 - DNA, 1035 bp, Artificial Sequence
  Synthetic polynucleotide
atggcactgttcgacttacctgattttgatgaccatgagcaagtggtctactgtagcgacgaagcttcgggtctgaaggccatcattgctatacactctacgaaattaggggcggcagttggcggttgccgcatgtgggattatgcggatgacgacgaagctttggttgacgtacttcgtctatccaaaggcatgacttacaaaaatgctatggccggtctctcaatgggcggcggtaaaagcgtcatcatcggtgatgctaaaaagctgaaatccaaggcgctgttcaaagcatttggggaagcgctgaaccgtctgaacggcaggtatctgagtgcagaggatgtaaacattaccacatctgatatcgacatcactaattctgttaccccattcgtgaccggaactgaaggtaaatccggaaacccggctccgttcactgctctgggcaccttcctgggtattaaggcaagcgtaaaacacaaattgaaccgtgacgatctgacaggcctgaaagttgcaatccagggccttgggtctgtgggttaccagctgtgcgatcatctccaccaggccggtgctgaactcgttatcactgacattaatcagaccgctctggacatggctgcgaccgaatttaacgctacgatcgtgggcctggacgaaatttacgatcaagaagttgatatctacgccccgtgcgccctgggggcaactattaacgatgataccctgaaccgccttaaggcgtccatcatcgctggctgtgcgaacaaccagctcgctgagccccgtcacgaccaggcgctagtagagcgcggtatcctgtatgccccggactacgttataaacgcgggaggtataattaatatctctttcgaacataactatgactgcgaaaaagcaactgagaaagttggcgacatttaccacactctgcttgatatctacgctaaggctgatgcccagaaccgtccaaccggtatcatcgcagacgaaatggccagagaaatcattaaaaacggcggtaaagct

SEQ ID NO: 119 - DNA, 1098 bp, Artificial Sequence
  Synthetic polynucleotide
atgacactggagatctttgaataccttgaaaagtatgactacgagcaagtagtcttctgccaggataaagaaagtggcttgaaagcaattatagccatccacgacactacgctgggtcctgctttagggggcactcgcatgtggacctatgatagcgaagaagctgcgatcgaagatgctctacgtctggcgaaaggtatgacctacaaaaatgcagctgccggtctcaacctgggcggtgcgaagactgttattatcggcgacccccgaaaagacaaatccgaggcaatgttccgtgcgctgggacgctacattcagggtctgaacggcagatacatcaccgctgaagatgtgggtacaaccgttgatgacatggacattatccatgaagaaactgacttcgtgtttgggatctcaccaagcttcggctcttctggtaacccgtccccggttacggcatatggcgtataccgcggcatgaaagctgctgcgaaagaggcctttggtaccgataacctggaagggaaggtaattgcggttcagggtgtcggtaatgtggcttatcacctctgtaaacatctgcacgctgaaggcgctaagctgattgttactgatatcaacaaagaggcagtccaaagggccgttgaggaatttggagcatcggcagtggaaccaaacgaaatctacggtgtagagtgcgatatctacgctccgtgcgccctgggcgcgaccgttaatgatgaaactatcccgcagctcaaagcgaaagtaattgcaggctccgccaacaaccagcttaaagaagaccgtcacggtgacatcattcatgaaatgggtatcgtttacgctccggactacgtgataaacgcgggcggtgttattaacgtggcagatgaactgtatggctataaccgtgagcgtgctctgaagcgtgttgaatctatatatgatactatcgctaaggtcatcgaaatcagcaaacgtgatggtatcgctacctacgtagctgccgaccgtctggctgaagagcgcatcgcctctctgaaaaattctaggagcacttacctgcgtaacggtcacgacataatcagccgccgc

SEQ ID NO: 120 - DNA, 1092 bp, Artificial Sequence
  Synthetic polynucleotide
atgggcatcttcgagaatttggaaatttatgactacgaacaactggtcttttgtcaggataagcagagtggtctgaaagccatcatcgctatacacgatacgaccttagggccggcgcttggtggtactcgcatgtggacctacagctctgaagacgatgcaattgaagacgctctccgtctggcacggggcatgacttataaaaacgctgcggctggcctgaacctgggcggtggcaaaacagtaatcattggtgaccctcgtcgtgataaaaacgaggaaatgttccgcgcatttgggcgttacatccagggcctgaacggtagatacatcaccgcggaagacgtgggtactactgttgcagatatggacctgattcatgaagagaccgatttcgttacgggaatctcgccagccttcggatcatctggtaatccctccccggctaccgcttacggcgtttatcgcggcatgaaggccgcggctaaagaggcttttggtactgacagcctggaaggcaaagtggtagcgattcagggtgtgggtaacgttgccatcaacctgtgcaaacaccttcgtggcgaaggtgcagagttgatcgttactgatatccataaagaatccgtccagcgcgctatagacgaatttggtgccaaggcggtagaaccggatgaaatctacggcgttgtttgcgacatctatgcaccgtgtgctctgggtgccgtaatcaatgatgaaaccattccgcgtctgaaagctaaagtgattgcaggtagcgcgaacaaccaattaaaggaaaccaaacacggcgacatgatccacgaactgggcattgtttacgctccggattatgtgatcaacgcgggcggggtcattaacgttgcggacgagctgtacggatacaaccgtgaacgcgcgctcaaaaaggtggaaggtatctatcagactattaataaagttatcgaaatctctaagcgtgatcaaattcctacctacctggccgcagatcgcctggctgaagaacgtatagcacgaatccgtaactcgcgctctcagttcttactgaacggccatcacattctgagccgcagg

SEQ ID NO: 121 - DNA, 1098 bp, Artificial Sequence
  Synthetic polynucleotide
atgacactggagatctttgaataccttgaaaagtatgactacgagcaagtagtcttctgccaggataaagaaagtggcttgaaagcaattatagccatccacgacactacgctgggtcctgctttagggggcactcgcatgtggacctatgatagcgaagaagctgcgatcgaagatgctctacgtctggcgaaaggtcagacctacaaaaatgcagctgccggtctcaacctgggcggtgcgaagactgttattatcggcgacccccgaaaagacaaatccgaggcaatgttccgtgcgctgggacgctacattcagggtctgaacggcagatacatcaccgctgaagatgtgggtacaaccgttgatgacatggacattatccatgaagaaactgacttcgtgaccgggatctcaccaagctttggctcttctggtaacccgtccccggttacggcatatggcgtataccgcggcatgaaagctgctgcgaaagaggccttcggtactgataacctggaagggaaggtaattgcggttcagggtgtcggtaatgtggcttatcacctctgtaaacatctgcacgctgaaggcgctaagctgattgttaccgatatcaacaaagaggcagtccaaagggccgttgaggaatttggtgcgtcggcagtagaaccgaatgaaatctacggcgttgaatgcgacatttacgccccgtgtgcgctgggtgccacggtcaacgatgaaactatccctcagctgaaagctaaggttatcgctggcagcgccaacaaccagctgaaagaagaccgtcatggagatatcatacacgagatgggtatcgtgtatgcgccggattacgtgatcaacgcagggggcgttattaatgtggcggacgaattatacggctataaccgtgaacgcgctttgaaacgggttgaatctatttacgatactatcgcaaaagtaatcgaaatcagcaaacgtgatggtattgctacctacgtcgcagctgaccgcttggctgaagagcggatcgcatctttaaagaactcccgtagcacctatctgcgcaacggccacgatatcatatcgcgacgt

SEQ ID NO: 122 - DNA, 1119 bp, Artificial Sequence
  Synthetic polynucleotide
atgatggagacgaacactgaaccgcgctttcgtattttcgatgtgcttcagtccgaagactacgaacaaatcgtattctgtcaggaccaggcgagtggtctgaaagctataatcgcaattcatgataccacattaggccccgccctgggtgggctgcgtatgtggaattatgaatctgagcaggaagctctgactgatgttttgcggctcgcaaagggcatgacctacaaaaacgcggctgcgggtctgaacctgggcggtggcaaagctgtcatcatcggtaacgcaaaaaccgacaagtcggaggccctgtttcgcgctttcgggcgttacgtacagtcactgagcggtcgttatatcactgctgaagacgttaatactaccgttgcagatatggacttcatccacatggaaacagattacgtgaccggcgtctctcctgcttttggctccagcggaaacccgagcccggtaaccgcctatggtgtttaccgcggcatgaaagcggcggcgaaatggaaattcggtactgatagtcttgcaggtaagactgttgctgtgcaaggcgttggaaacgtagcctataatctgtgccgtcacctacatgaagaaggcgctcacctgattgtgacggacataaacgaagaggccttgaaaagggcagaggcagactttggtgctaccgtcgttaaaccagacgaaatttacgccgttgaatgcgatatcttcgcgccgtgtgctctgggtgcggttatcaacgataaaacgattccgcagctgaaggcccagatcgttgctggcgctgcgaacaatcagcttgcagaggatcgccacggtgatgtactcgacgaaaacggcatcctgtacgctccggacttcgtgattaacgcgggcggcgttatcaacgtagccgacgaactggaaggttacaaccgtgaacgtgctatgaaaaaagttgaactaatctatgataatatgatgcgcgtctttgaaattgctgagcgtgacggtgtgccgactcatgttgcagcggacaaaatggctgaggaacgtattcacatgatgtctcgctctcgatcccaattcctgaaagtggaaaagtctatcctgggtcgtcgc

SEQ ID NO: 123 - DNA, 1098 bp, Artificial Sequence
  Synthetic polynucleotide
atgcagctgttcgactatttaagcaagtacgattacgagcaactgattttttgtcaggacgaaaattcgggtctaaaagccatcatcgctatacacgatacgaccttagggccggcgttgggcggtactcgcatgtggacctatgcatctgaagaagatgctattgttgacgcacttcgtctcgctcggggcatgacttacaaaaacgcggctgccggtctgaacctgggcggtggcaaaacagtaatcatcggagaccctaaaaccgataagaacgaggcgatgttccgtgccttcggtagatttatccagggcctgaatggccgttacattactgctgaagacgtcggtaccactgtggaagatatggacctgatccatgaagagactaggttcgttaccggcatttcccccgaatttgggagttctggtaacccgagcccggttaccgcatatggttgctacatgggcatgaaagcggctgctaaagaggcattcggtgacgattcactcgaaggtcgtacagtagcagtacaaggcgtgggctccgttgcttaccacctgtgcaaatatctgcatgatgaaggtgcgaagctgatcgttacggacattaaccaggaaaacctggcgcgcgccgtgaatgatttcgacgcacagactgtcgacccggatagcatctacgatgtggattgcgacatcttttctccatgtgctctgggtgcagttattaacgacgataccgttaaccgcctgaaatgcaaagtaatcgctggatcggctaacaatcagctgaaagacaacgaacacggcgatatcctacaagagaaggggatattctacgcaccagactatgtgatcaactccggtggcgtaattaacgtcgctgacgaattgatcgggtataatcgtgaaagggctatgcgtcgcgttgagggcatctacggaaccatcctacgtgtttttgaaattgccaaacgtgatcgcattccgtcttacctggcggcagatcgtatggcagaagaaagaatcgctagcatccgtcagtctcgtagcccgttcctgcaaaatgaacgcaacatcatcaacatgactctgcgt

SEQ ID NO: 124 - DNA, 1098 bp, Artificial Sequence
  Synthetic polynucleotide
atgacactggagatctttgaataccttgaaaagtatgactacgagcaagtagtcttctgccaggataaagaaagtggcttgaaagcaattatagccatccacgacactacgctgggtcctgctttagggggcactcgcatgtggacctatgatagcgaagaagctgcgatcgaagatgctctacgtctggcgaaaggtatgacctacaaaaatgcagctgccggtctcaacctgggcggtgcgaagactgttattatcggcgacccccgaaaagacaaatccgaggcaatgttccgtgcgctgggacgctacattcagggtctgaacggcagatacatcaccgctgaagatgtgggtacaaccgttgatgacatggacattatccatgaagaaactgacttcgtgaccgggatctcaccaagctttggctcttctggtaacccgtccccggttacggcatatggcgtataccgcggcatgaaagctgctgcgaaagaggccttcggtactgataacctggaagggaaggtaattgcggttcagggtgtcggtaatgtggcttatcacctctgtaaacatctgcacgctgaaggcgctaagctgattgttaccgatatcaacaaagaggcagtccaaagggccgttgaggaatttggtgcgtcggcagtagaaccgaatgaaatctacggcgttgaatgcgacatttacgccccgtgtgcgctgggtgccacggtcaacgatgaaactatccctcagctgaaagctaaggttatcgctggcagcgccaacaaccagctgaaagaagaccgtcatggagatatcatacacgagatgggtatcgtgtatgcgccggattacgtgatcaacgcagggggcgttattaatgtgcgcgacgaattatacggctataaccgtgaacgcgctttgaaacgggttgaatctatttacgatactatcgcaaaagtaatcgaaatcagcaaacgtgatggtattgctacctacgtcgcggctgaccgcttggctgaagagcggatcgcatctttaaagaactcccgtagcacctatctgcgtaacggccacgatatcatatcgaggcgt

SEQ ID NO: 125 - DNA, 1125 bp, Artificial Sequence
  Synthetic polynucleotide
atgacagacgtgtcggaacgtagcggcgttctgtcccggattttcgccaccgatccgaacgcggctccaggtgactcacatgagcaggtcgtgctttgtcacgatcgtgacacggggttaaaagctgtaatcgcaatccactctaccgctctgggccctgcgttgggtggaactcgctttcatccgtacgcaactgaagaagaagccgttcaagatgctctcaatctgagtcgcggcatgagctataagaacgcaatggccggtctggacctgggcggtggtaaagcggtaatcataggcgatccgactaaaattaagaccgaggcgctgctgcgtgcttacggccgtttcgttcagtctctgaacggtcgctatgtcaccgcttgcgacgtagggacttacgttgcagatatggacgttatcgcccgtgaatgcgatttcgtcacgggtcgctcccccgaatacggcggtgctggcgatagctctgtgctaacctcgtttggggtcttccagggaatgcgagctgcggctcagcacaaatggggttccccgtcactcgaaggccgtcgtgttggtgttgcaggcattggaaaagttggtcactatctagttgagcatctgatcgaagacggtgctcaggtagttatcacagacgtgcgcgaggatgctgtgaaccgcgtccgtgcagcgcaccctggcgtagaagttgcggccgacactgacgctctgattcgtgctaacttggacgtatacgcaccgtgtgcattaggcggcgcactgaatgatgaaaccgtgccggcactaacggctaaaatcgttgcaggtgccgcgaacaatcagctggctcacccaggcgtggaaaaggatctcgccgataggggcatcctgtatgcgccggactacgtaattaacgctggtggcgtgattcaagtcgctgacgaaatcgaaggttttaacttcgatcgtgcgaaagcaaaagcttctaaaatcttcgataccactctggagatttttgctctggcggacagcgatggtgtaccgcctgctgtggcagctgaccgcctggcagaacgtagaatggcagaggttggccgtctgcgcactatcctgctgccgcgttctcgt

SEQ ID NO: 126 - DNA, 1059 bp, Artificial Sequence
  Synthetic polynucleotide
atgaacatcttcgactatttgaaggagtacgattacgaacaagtggtcttttgtcaggacaaacatagtggtctgaaagccattatcggcatacacgatacgaccttagggccggcacttggtggtactcgcatttgggactataaatctgaagaagaagcgatcattgatgttctccgtctggctcggggcatgacttacaaaaatgctgctgcgggcctgaacctgggcggtggtaaagcagttatcatcggagaccccgagaagatcaaatcagaagaactgttcagaaccttcggccgttttgtagagtccctgggtggccgttacatcaccgctgaagatatgaacgccggcacaaaagacatggcgtacattaacgaagaaactaactatgtagttggtttggaaggtaagagcggtaacccgtctccagtgaccgcgttcggcgtctttaaagggatcctggctgctgttgacgaggtgtatgggtccgagggtctgaaaggcaaaactgttgcagtccagggtctgggcgccgtcggctacggtctgtgcgaatacctgcacaaagctggcgcaaagctgttagtgaccgatatacgcaaagatagcatcgagaaaatcgttaatgaatttggtgctaaatcggtgaatccggacgatatttacggtgtagactgcgatatcttcgccccttgcgctatgggcgctattatcaacgacttcacgatcgataagcttaaatgtaaaattgtagcgggttgcgccaacaaccagctggcagaagaaaaacatggggacatgctgatggagaaggaaatcctgtatattccagactacgttatcaatagcggaggcgttatcaacgtgtatgaagagctgaaaggttacaacaaggaacgtgctatggatcgcgctgcgggcatctacgattctgttaaaaaaattattgaaatctctaaacgagataacattccgacgtacaaagcagctaaccgcatggctgaggaacgtatcgcggccatcggtcgtgtaaagaaaatgtatctaaaaaaa

SEQ ID NO: 127 - DNA, 1098 bp, Artificial Sequence
  Synthetic polynucleotide
atgacactggagatctttgaataccttgaaaagtatgactacgagcaagtagtcttctgccaggataaagaaagtggcttgaaagcaattatagccatccacgacactacgctgggtcctgctttagggggcactcgcatgtggacctatgatagcgaagaagctgcgatcgaagatgctctacgtctggcgaaaggtatgacctacaaaaatgcagctgccggtctcaacctgggcggtgcgaagactgttattatcggcgacccccgaaaagacaaatccgaggcaatgttccgtgcgctgggacgctacattcagggtctgaacggcagatacatcaccgctgaagatgtgggtacaaccgttgatgacatggacattatccatgaagaaactgacttcgtgaccgggatctcaccaagctttggctcttctggtaacccgtccccggttacggcatatggcgtataccgcggcatgaaagctgctgcgaaagaggccttcggtactgataacctggaagggaaggtaattgcggttcagggtgtcggtaatgtggcttatcacctctgtaaacatctgcacgctgaaggcgctaagctgattgttaccgatatcaacaaagaggcagtccaaagggccgttgaggaatttggtgcgtcggcagtagaaccgaatgaaatctacggcgttgaatgcgacatttacgccccgtgtgcgctgggtgccacggtcaacgatgaaactatccctcagctgaaagctaaggttatcgctggcagcgccaacaaccagctgaaagaagaccgtcatggagatatcatacacgagatgggtatcgtgtatgcgccggattacgtgatcaacgcagggggcgttattaatgtggcggacgaacagtacggctataaccgtgaacgcgctttaaaacgggttgaatctatttacgatactatcgcaaaagtaatcgaaatcagcaaacgtgatggtattgctacctacgtcgcagctgaccgcttggctgaagagcggatcgcatctttaaagaactcccgtagcacctatctgcgcaacggccacgatatcatatcgcgacgt

SEQ ID NO: 128 - DNA, 1032 bp, Artificial Sequence
  Synthetic polynucleotide
atggcagtgttcaaccatgttagctacgatgagcacgaacaagtagtcttttgtcacgacaaggaatcgggtctgaaagccatcattgctgtgcataatacgaacttagggccggcggttggcggttgccgcatgtggaactatcagtctgacgaagaagctttgaatgatgttcttcgtctatcccggggcatgacttacaaaaacgcactggctggtctcaccatgggcggcggtaaaagtgtaatcattgcggaccctaaaactcaggatcgtgaggccctgttccgcgcttttggacgtttcatcaacaccctgggtggcaagtattacagcgcggaagacgtcggtacaactaccgcagatatcatgatagctcaccaggaaaccccatacatggcgggcctggagggtaaatctggggacccgtccccgttcactgctctgggcactttcctgggtatcaaagcagcggtaaaacaccaacgtggcctggattctctgaagggactgaaaattgccgtgcagggtgttgggcatgtaggttattacctctgcaaacacctccatgaagaaggcgctgaattgatcgttaccgacattcatcaggcatcacttgataaggttgcaaccgaatttggcgctgcggtcgttgctccgcaggacatctactctcaagatgtggacatctatgccccctgcgctctgggtgctactataaacgatgcaacgctaccgctcctgaaagcgaaaatcgtcgctggctgcgctaacaatcagctggcagagcctcgtcacggtcagatgctgaaagacatgggaattttgtacgccccggattatgtgatcaacgcgggcggcatcattaacgttagtttcgaaaacgactacgatgctgcgcgaagcaccgcaaaagtggaaaaaatctacgatactctgttaacgatttttactgccgctgacgaacagaataggaccacaggtgctgttgccgatgagatggcgcgtgccatcattgatgctgccagaaag

SEQ ID NO: 129 - DNA, 1098 bp, Artificial Sequence
  Synthetic polynucleotide
atgacactggagatctttgaataccttgaaaagtatgactacgagcaagtagtcttctgccaggataaagaaagtggcttgaaagcaattatagccatccacgacactacgctgggtcctgctttagggggcactcgcatgtggacctatgatagcgaagaagctgcgatcgaagatgctctacgtctggcgaaaggtatgacctacaaaaatgcagctgccggtctcaacctgggcggtgcgaagactgttattatcggcgacccccgaaaagacaaatccgaggcaatgttccgtgcgctgggacgctacattcagggtctgaacggcagatacatcaccgctgaagatgtgggtacaaccgttgatgacatggacattatccatgaagaaactgacttcgtgaccgggatctcaccaagctttggctcttctggtaacccgtccccggttacggcatatggcgtataccgcggcatgaaagctgctgcgaaagaggccttcggtactgataacctggaagggaaggtaattgcggttcagggtgtcggtaatgtggcttatcacctctgtaaacatctgcacgctgaaggcgctaagctgattgttaccgatatcaacaaagaggcagtccaaagggccgttgaggaatttggtgcgtcggcagtagaaccgaatgaaatctacggcgttgaatgcgacatttacgccccgtgtgcgctgggtgccacggtcaacgatgaaactatccctcagctgaaagctaaggttatcgctggcagcgccaacaaccagctgaaagaagaccgtcatggagatatcatacacgagatgggtatcgtgtatgcgccggattacgtgatcaacgcagggggctctattaatgtggcggacgaattatacggctataaccgtgaacgcgctttgaaacgggttgaatccatttacgatactatcgcaaaagtaatcgaaatcagcaaacgtgatggtattgctacctacgtcgcagctgaccgcttggctgaagagcggatcgcatctttaaagaactctcgtagcacctatctgcgcaacggccacgatatcatatcgcgacgt

SEQ ID NO: 130 - DNA, 1074 bp, Artificial Sequence
  Synthetic polynucleotide
atgcagcacttcgaggttattgcggaaatgggccatgaacaagtggtcttttgtcacgacaaggctagtggttaccgcgggatcatcgccatacatgatacgaccttaggcccggcattgggtggtactcgtttctggaactatgcaactgacgaagatgcttttattgacgctcttcgtctatccagaggcatgacctacaaaaatgcggtagctggtctcaacctgggcggaggtaaagcggttatcatcggcgataacaaaaccccacaccgcgagatgctgttccgtgcccacgggcgtttctgcgactcactgggcggtcggtatgtgacagcagaagatgtaggtactactgtcgaagatatggacttcgttcatatggaaaccacccacgtagccggcatcggatctaaatctggcgacccttcgagcgttactgctcacggcgtttttcgcgctattgaggcaagcgcgcatgcccgttggggttctaactccctggaaggtaggacgatcgctctgcaaggtctgggtcacgtcggcactcatctggctaaggaactccacgcagcaggcgcgcagctggtggttacggatattgacgcaggccgtattgctcacgtggtagatacatgcggtgcgcgcgctgttgcgctgaacgaaatctacggtgtcaaagcagatatcttcaccccgtgtgcactgggtggcgtgatcaatgacgacaccattccccagttgcaggttgagatcgttgctggagctgccaacaaccagctgctggaagatcgtcatggtgacgaactcgagcgtcgaggcatcctgtacgctccggattatgtggccaatgcgggtggtgtcattaacgtatacagcgaactgaccggctggtcgcgtgaccgcgctctgagaaaagctgatgaaatatatgaaactgttctttccgtttttcgcatggcaaaatctactggtatcccgacctaccaggctgccgaccgtgttgctgagcagcgcatcaacgctgtgcgtggtatgatacgtacttggccgcaataccctaataaggagaca

SEQ ID NO: 131 - DNA, 1071 bp, Artificial Sequence
  Synthetic polynucleotide
atgatgagcgtggacactatgaagatcaatgagcccacgaccaggcaagatgacttcctggattatgcgttatcgcacggttttggcgatatacatttcaaagtcgatagtaaaaccggtatgaaagccatcattgctatccactcaactaagctgggcccagctttgggcgggtgccgttttattgaatacccttctaccgaaaacgcaatcaacgacgcaatgcgactcgctcgtggtatgtcttacaaagcggccagcgtaaacctgccgctaggcggtggaaaagcggttgttattaaaccgcatggcccgtacgaccacgaagcttatttccacgctttcggtgaatttgtaaacgaccttggtggccgctacatcacagcactggatagcggtactcagctgtccgacatggatattatcgctcagcacactccgtacgttgcatccctgtcctcccataatggcgatccgtctccatctaccgcaaagggggtgttcaaaggaatcgaggctgcggttcactttaaattgggtaaagacaacctgaaaggcctgcatatcgccattcagggtctcggacatgttggttatctgctagctcgccacctgcacgaagcgggcgctagactgactgtcgcggacgtgaacaaggaagctgtagagcgcgccgttaacgaatttggcgcagctgccatatcgaccgatacgatccataaagtcccttgtgatgtgttctccccgtgcgctctgggtgcgatcctgaacgatatgaccatcaatcagctgcaaacgactattgtagccggcgcagctaacaatcagctggcacacacctaccacgggaaaatcctgcatgacaaagggatcgtttatgctgcggactacgtcattaacgcgggtggtctgatcttcgctgcatctaagtatttaaacacaccagaggaacaggttgtgaaacagattaactcaatcggcactagcctgatggaaatcttcgttcgtagccagaaggaaaatcgtccggcatctgaaatagccgataccctggctcaagaaaaactggcg

SEQ ID NO: 132 - DNA, 1098 bp, Artificial Sequence
  Synthetic polynucleotide
atgacactggagatctttgaataccttgaaaagtatgactacgagcaagtagtcttctgccaggataaagaaagtggcttgaaagcaattatagccatccacgacactacgctgggtcctgctttagggggcactcgcatgtggacctatgatagcgaagaagctgcgatcgaagatgctctacgtctggcgaaaggtatgacctacaaaaatgcagctgccggtctcaacctgggcggtgcgaagactgttattatcggcgacccccgaaaagacaaatccgaggcaatgttccgtgcgctgggacgctacattcagggtctgaacggcagatacttcaccgctgaagatgtgggtacaaccgttgatgacatggacatcatccatgaagaaactgactttgtgaccgggatttcaccaagcttcggctcttctggtaacccgtccccggttacggcatatggcgtataccgcggcatgaaagctgctgcgaaagaggcctttggtactgataacctggaagggaaggtaatcgcggttcagggtgtcggtaatgtggcttatcacctctgtaaacatctgcacgctgaaggcgctaagctgattgttaccgatatcaacaaagaggcagtccaaagggccgttgaggaatttggagcatcggcagtggaaccaaacgaaatctacggtgtagagtgcgatatctacgctccgtgcgccctgggcgcgactgttaatgatgaaaccattccgcagctcaaagcgaaagtaattgcaggctccgccaacaaccagcttaaagaagaccgtcacggtgacatcatccatgaaatgggtattgtttacgctccggactacgtgataaacgcgggcggtgttatcaacgtggcagatgaactgtatggctataaccgtgagcgtgctctgaagcgtgttgaatctatatatgatactatcgctaaggtcatcgaaatcagcaaacgtgatggtatcgctacctacgtagctgccgaccgtctggctgaagagcgcattgcctctctgaaaaattctaggagcacttacctgcgtaacggtcacgacatcatcagccgccgc

SEQ ID NO: 133 - DNA, 1098 bp, Artificial Sequence
  Synthetic polynucleotide
atgacactggagatctttgaataccttgaaaagtatgactacgagcaagtagtcttctgccaggataaagaaagtggcttgaaagcaattatagccatccacgacactacgctgggtcctgctttagggggcactcgcatgtggacctatgatagcgaagaagctgcgatcgaagatgctctacgtctggcgaaaggtgagacctacaaaaatgcagctgccggtctcaacctgggcggtgcgaagactgttattatcggcgacccccgaaaagacaaatccgaagcaatgttccgtgcgctgggacgctacattcagggtctgaacggcagatacatcaccgctgaagatgtgggtacaaccgttgatgacatggacattatccatgaagagactgacttcgtgaccgggatctcaccaagctttggctcttctggtaacccgtccccggttacggcatatggcgtataccgcggcatgaaagctgctgcgaaagaagccttcggtactgataacctggaagggaaggtaattgcggttcagggtgtcggtaatgtggcttatcacctctgtaaacatctgcacgctgagggcgctaagctgattgttaccgatatcaacaaagaagcagtccaaagggccgttgaggaatttggtgcgtcggcagtagagccgaatgaaatctacggcgttgaatgcgacatttacgccccgtgtgcgctgggtgccacggtcaacgatgaaactatccctcagctgaaagctaaggttatcgctggcagcgccaacaaccagctgaaagaagaccgtcatggagatatcatacacgaaatgggtatcgtgtatgcgccggattacgtgatcaacgcagggggcgttattaatgtggcggacgaattatacggctataaccgtgaacgcgctttgaaacgggttgaatctatttacgatactatcgcaaaagtaatcgaaatcagcaaacgtgatggtattgctacctacgtcgcagctgaccgcttggctgaagagcggatcgcatctttaaagaactcccgtagcacctatctgcgcaacggccacgatatcatatcgcgacgt

SEQ ID NO: 134 - DNA, 1074 bp, Artificial Sequence
  Synthetic polynucleotide
atgaacgcgccgctcgctcaagcagtagctctggaagacactagcacagcctttgatcacccagagttctctggccatgaacaggtcgttttcgcgcacgaccccgctagtgggcttcgtgcaattatcgcaatccataataccagattaggtccggctctgggtggctgccgtatgtggggttatcgcacgtcccgtgaagctctgactgatgcattgcgcctgtctaagggcatgacctacaaaaacgccctggcgggtctgcctctgggcggaggtaaaagcgtgattatcgccgacccgaaaactgagaaaaccccggaactgctaaaggcgttcggccgtcacgttgaacgtctggctggtggctacataaccgctgaagatgtaggcatcaccgcggcggacatggaactgattgcatcgcagactggtcatgctcgcggcacggaagcgactggtctgggggatccgtcaccttatactgctctgggtgtctttaccggcatccaggcagctgttgcgcacaaattcgggacttcccaccttaccggtatcaccgtgtctgttcagggtctgggcaacgttggctacggtgtgtgtcgttacctgcacgctcatggcgccaaacttgttgtgtcggatatacacgagccgaacgtaaagcgcgcggttgctgaatttggcgctcaaccaatcgaccctcaccaggcccatgcggcagacgtcgacgtttatgctccgtgcgcattgggtgccactattaacgctgcaactatcccgcagattaaagctaaaatcatcgcaggagctgcgaataaccagctccagacaccagaagatggtgtgaaactcatgcagagggggatcctgtacgctccggattacgcgctgaacgctggcggcgtaattagcgttgcgctggctacgagctctaaagacgatgcgatggttcgtgagaaaaccctagccatcggagacaccctaactgctattttcaagcgcgcagatctggagggtctgcccaccagcgtggtagccgataagctggctgaagagcgtttaatggcaggt

SEQ ID NO: 135 - DNA, 1098 bp, Artificial Sequence
  Synthetic polynucleotide
atgacactggagatctttgaataccttgaaaagtatgactacgagcaagtagtcttctgccaggataaagaaagtggcttgaaagcaattatagccatccacgacactacgctgggtcctgctttagggggcactcgcatgtggacctatgatagcgaagaagctgcgatcgaagatgctctacgtctggcgaaaggtatgacctacaaaaatgcagctgccggtctcaacctgggcggtgcgaagactgttattatcggcgacccccgaaaagacaaatccgaggcaatgttccgtgcgctgggacgctacattcagggtctgaacggcagatacatcaccgctgaagatgtgggtacaaccgttgatgacatggacattatccatgaagaaactgacttcgtgaccgggatctcaccaagctttggctcttctggtaacccgtccccggttacggcatatggcgtataccgcggcatgaaagctgctgcgaaagaggccttcggtactgataacctggaagggaaggtaattgcggttcagggtgtcggtaatgtggcttatcacctctgtaaacatctgcacgctgaaggcgctaagctgattgttaccgatatcaacaaagaggcagtccaaagggccgttgaggaatttggtgcgtcggcagtagaaccgaatgaaatctacggcgttgaatgcgacatttacgccccgtgtgcgctgggtgccacggtcaacgatgaaactatccctcagctgaaagctaaggttatcgctggcagcgccaacaaccagctgaaagaagaccgtcatggagatatcatacacgagatgggtatcgtgtatgcgccggattacgtgatcaacgcagggggcgttattaatgtggcggacgaagcttacggctataaccgtgaacgcgctttaaaacgggttgaatctatttacgatactatcgcaaaagtaatcgaaatcagcaaacgtgatggtattgctacctacgtcgcagctgaccgcttggctgaagagcggatcgcatctttaaagaactcccgtagcacctatctgcgcaacggccacgatatcatatcgcgacgt

SEQ ID NO: 136 - DNA, 1098 bp, Artificial Sequence
  Synthetic polynucleotide
atgacactggagatctttgaataccttgaaaagtatgactacgagcaagtagtcttctgccaggataaagaaagtggcttgaaagcaattatagccatccacgacactacgctgggtcctgctttagggggcactcgcatgtggacctatgatagcgaagaagctgcgatcgaagatgctctacgtctggcgaaaggtatgacctacaaaaatgcagctgccggtctcaacctgggcggtgcgaagactgttattatcggcgacccccgaaaagacaaatccgaggcaatgttccgtgcgctgggacgctacattcagggtctgaacggcagatacatcaccgcttcagatgtgggtacaaccgttgatgacatggacattatccatgaagaaactgacttcgtgaccgggatctctccaagctttggctcttccggtaacccgtctccggttacggcatatggcgtataccgcggcatgaaagctgctgcgaaagaagccttcggtactgataacctggaggggaaggtaattgcggttcagggtgtcggtaatgtggcttatcacctctgtaaacatctgcacgctgaaggcgctaagctgattgttaccgatatcaacaaagaagcagtccaaagggccgttgaggaatttggtgcgagcgcagtagagccgaatgaaatctacggcgttgaatgcgacatttacgccccgtgtgcgctgggtgccacggtcaacgatgaaactatccctcagctgaaagctaaggttatcgctggctcggccaacaaccagctgaaagaagaccgtcatggagatatcatacacgaaatgggtatcgtgtatgcgccggattacgtgatcaacgcagggggcgttattaatgtggcggacgagttatacggctataaccgtgaacgcgctttgaaacgggttgaatccatttacgatactatcgcaaaagtaatcgaaatcagcaaacgtgatggtattgctacctacgtcgcagctgaccgcttggctgaagagcggatcgcatctttaaagaactctcgtagcacctatctgcgcaacggccacgatatcatatcgcgacgt

SEQ ID NO: 137 - DNA, 1098 bp, Artificial Sequence
  Synthetic polynucleotide
atgacactggagatctttgaataccttgaaaagtatgactacgagcaagtagtcttctgccaggataaagaaagtggcttgaaagcaattatagccatccacgacactacgctgggtcctgctttattcgggactcgcatgtggacctatgatagcgaagaagctgcgatcgaagatgctctacgtctggcgaaaggtatgacctacaaaaatgcagctgccggcctcaacctgggtggcgcgaagactgttattatcggtgacccccgaaaagacaaatccgaggcaatgtttcgtgcgctgggacgctacattcagggcctgaacggtagatacatcaccgctgaagatgtgggtacaaccgttgatgacatggacattatccatgaagaaactgacttcgtgaccgggatctcaccaagcttcggctcttctggtaacccgtccccggttacggcatatggcgtataccgcggcatgaaagctgctgcgaaagaggcctttggtactgataacctggaaggaaaggtaattgcggttcagggtgtcggtaatgtggcttatcacctctgtaaacatctgcacgctgaaggcgctaagctgattgttaccgatatcaacaaagaggcagtccaaagggccgttgaggaatttggcgcatcggcagtggaaccaaacgaaatctacggtgtagagtgcgatatctacgctccgtgcgccctgggcgcgactgttaatgatgaaaccatcccgcagctcaaagcgaaagtaattgcaggatccgccaacaaccagcttaaagaagaccgtcacggtgacatcattcatgaaatgggcatcgtttacgctccggactacgtgataaacgcgggcggtgttattaacgtggcagatgaactgtatggctataaccgtgagcgtgctctgaagcgtgttgaatctatatatgatactatcgctaaggtcatcgaaatcagcaaacgtgatggtatcgctacctacgtagctgccgaccgtctggctgaagagcgcatcgcctctctgaaaaattctaggagcacttacctgcgtaacggtcacgacataatcagccgccgc

SEQ ID NO: 138 - DNA, 1098 bp, Artificial Sequence
  Synthetic polynucleotide
atgacactggagatctttgaataccttgaaaagtatgactacgagcaagtagtcttctgccaggataaagaaagtggcttgaaagcaattatagccatccacgacactacgctgggtcctgctttagggggcactcgcatgtggacctatgatagcgaagaagctgcgatcgaagatgctctacgtctggcgaaaggtatgacctacaaaaatgcagctgccggtctcaacctgggcggtgcgaagactgttattatcggcgacccccgaaaagacaaatccgaggcaatgttccgtgcgctgggacgctacattcagggtctgaacggcagatacatcaccgctgaagatgtgggtacaaccgttgatgacatggacattatccatgaagaaactgacttcgtgaccgggatctcaccaagctttggctcttctggtaacccgtccccggttacggcatatggcgtataccgcggcatgaaagctgctgcgaaagaggccttcggtactgataacctggaagggaaggtaattgcggttcagggtgtcggtaatgtggcttatcacctctgtaaacatctgcacgctgaaggcgctaagctgattgttaccgatatcaacaaagaggcagtccaaagggccgttgaggaatttggtgcgtcggcagtagaaccgaatgaaatctacggcgttgaatgcgacatttacgccccgtgtgcgctgggtgccacggtcaacgatgaaactatccctcagctgaaagctaaggttatcgctggcagcgccaacaaccagctgaaagaagaccgtcatggagatatcatacacgagatgggtatcgtgtatgcgccggattacgtgatcaacgcagggggcgttattaatgtgttcgacgaattatacggctataaccgtgaacgcgctttgaaacgggttgaatctatttacgatactatcgcaaaagtaatcgaaatcagcaaacgtgatggtattgctacctacgtcgcggctgaccgcttggctgaagagcggatcgcatctttaaagaactcccgtagcacctatctgcgcaacggccacgatatcatatcgcgacgt

SEQ ID NO: 139 - DNA, 1101 bp, Artificial Sequence
  Synthetic polynucleotide
atggagatcttcaagtatatggaacagtacgactacgaacaactggtcttttgtcaggataaagaaagtggtctcaaagccattatcgctatacacgatacgaccttagggccggcgttgggcggtactcgcatgtggatgtatgagtctgaagacgctgcaattgaagacgcacttcgtctggctcggggcatgacttacaaaaatgcggctgccggtctgaacctgggcggtggcaaagcagtaatcatcggagatcctcgtaaggacaaaaacgaagcgatgttccgcgctttcggtagatttatccagggcctgaacggccgttacattaccgctgaggatgttggtacaactgtggcagacatggacatcatctacgaagaaaccgattatgttaccggcatttcccccgccttcggtagctcgggtaacccgtcaccggtgactgcgtatggtgtataccgtggcatgaaagcggcagctaaagaagcgtttgggtctgactccctggaaggcaaagttgtcgctgttcaaggtgtgggcaatgttgcctacaacctgtgccgacatttacacgaggaaggtgctaagctgatcgtaactgatattaacaaggaggctgttcagcgcgtggtagagcagtttggcgcaaccgctgttgatccaaacgatatctacggtgtcgactgcgacattttcgccccgtgtgccctcggaggtatcatcaatgatcagactatccctcagctgaaagcaaaagttatcgctggtgcggcaaacaaccaactgcgcgaagcacgtcatggcgatattatacacgaaatgggaatcgtgtatgcgccggattacgttatcaacgcaggcggtgtaatcaacgtcgctgacgagctatatgggtacaatcgtgaacgtgcgatgaaaaaagtagaacagatttataacaacatcgaaaaagttattgaaattgccaaacgcgatggcatcccaacctaccaggcggccgaccgtttagctgaagaacgtatagctaaaatgcgccaaagccgttctcagttcctgcaaaacggtcagcacattctgagccgccggcgtacgcgt

SEQ ID NO: 140 - DNA, 1098 bp, Artificial Sequence
  Synthetic polynucleotide
atgacactggagatctttgaataccttgaaaagtatgactacgagcaagtagtcttctgccaggataaagaaagtggcttgaaagcaattatagccatccacgacactacgctgggtcctgctttagggggcactcgcatgtggacctatgatagcgaagaagctgcgatcgaagatgctctacgtctggcgaaaggtatgacctacaaaaatgcagctgccggtctcaacctgggcggtgcgaagactgttattatcggcgacccccgaaaagacaaatccgaggcaatgttccgtgcgctgggacgctacattcagggtctgaacggcagatacatcaccgctgaagatgtgggtacaaccgttgatgacatggacattatccatgaagaaactgacttcgtgaccgggatctcaccaagctttggctcttctggtaacccgtccccggttacggcatatggcgtataccgcggcatgaaagctgctgcgaaagaggccttcggtactgataacctggaagggaaggtaattgcggttcagggtgtcggtaatgtggcttatcacctctgtaaacatctgcacgctgaaggcgctaagctgattgttaccgatatcaacaaagaggcagtccaaagggccgttgaggaatttggtgcgtcggcagtagaaccgaatgaaatctacggcgttgaatgcgacatttacgccccgtgtgcgctgggtgccacggtcaacgatgaaactatccctcagctgaaagctaaggttatcgctggcagcgccaacaaccagctgaaagaagaccgtcatggagatatcatacacgagatgggtatcgtgtatgcgccggattacgtgatcaacgcagggggcgttattaatgtggcggacgaatgctacggctataaccgtgaacgcgctttaaaacgggttgaatctatttacgatactatcgcaaaagtaatcgaaatcagcaaacgtgatggtattgctacctacgtcgcagctgaccgcttggctgaagagcggatcgcatctttaaagaactcccgtagcacctatctgcgcaacggccacgatatcatatcgcgacgt

SEQ ID NO: 141 - DNA, 1098 bp, Artificial Sequence
  Synthetic polynucleotide
atgacactggagatctttgaataccttgaaaagtatgactacgagcaagtagtcttctgccaggataaagaaagtggcttgaaagcaattatagccatccacgacactacgctgggtcctgctttagggggcactcgcatgtggacctatgatagcgaagaagctgcgatcgaagatgctctacgtctggcgaaaggtatgacctacaaaaatgcagctgccggtctcaacctgggcggtgcgaagactgttattatcggcgacccccgaaaagacaaatccgaggcaatgttccgtgcgctgggacgctacattcagggtctgaacggcagatacatcaccgctgaagatgtgggtacaaccgttgatgacatggacattatccatgaagaaactgacttcgtgaccgggatctcaccaagctttggctcttctggtaacccgtccccggttacggcatatggcgtataccgcggcatgaaagctgctgcgaaagaggccttcggtactgataacctggaagggaaggtaattgcggttcagggtgtcggtaatgtggcttatcacctctgtaaacatctgcacgctgaaggcgctaagctgattgttaccgatatcaacaaagaggcagtccaaagggccgttgaggaatttggtgcgtcggcagtagaaccgaatgaaatctacggcgttgaatgcgacatttacgccccgtgtgcgctgggtgccacggtcaacgatgaaactatccctcagctgaaagctaaggttatcgctggcagcgccaacaaccagctgaaagaagaccgtcatggagatatcatacacgagatgggtatcgtgtatgcgccggattacgtgatcaacgcagggggcgttattaatgtggcggacgaattttacggctataaccgtgagcgtgctctgaaacgtgttgaatctatatatgatactatcgctaaggtaatcgaaatctcaaaacgtgatggtattgctacctacgtagcagctgaccgtcttgctgaagagcgcatcgcctctctgaaaaactctaggtccacttacctgcgtaacggtcacgacataatcagccgccgc

SEQ ID NO: 142 - DNA, 1101 bp, Artificial Sequence
  Synthetic polynucleotide
atggtaacggacgtcattaatgcgaacgaactgcataaggctgatccagtgtttgggcagctatccttcgataaccacgagcaagttgttttctgcaacgacaaagatacaggcctcaaagccatcatcggtattcacaacactgtgttaggcccggctctgggtggtacccgtatgtggaattataccaacgaatgggaagcacttaacgacgttttgcgcctgtctcgaggcatgacttacaaatcggcaatcaccggtctgaatctgggcggaggtaaagcggtaatcatcggcgacgctaagactcagaaaaccccggagctgatgaaaaagttcggcgaatttgttcattctctgagcggtcgttacattactgctgaagatgtaggcatggagacggcggacatggatctggttaggcaggtgaccccttatgttactggtatatcagaagaactgggcggcgcaggaaaccccagtccgattacagcttacggtgtcttcatggggatgaaagccgcggcaaaatttaagttcggctccgacgttctcgaagataaaaccgtcttcgtacagggtatcggtaacgtgggtgaggctttagtcgaacacctagttgacgaaggagccaaagtgactatcgcggatattaaccaggagcgcctggaagctattcgtaaaaaatacggtgtaaccatctatggcggctctgatctgtacagcgaagacatggatatctatgctccgtgtgcactgggtgccacgattaacgatgacaccatctacaaattgaaagctaaagtcatcgccggggctgcgaacaatcaactggctgttgaagaaaagcacggcaagatcctgcaagagcgtgatatcgtttacgcgccggactttctgataaacgcaggtggtatcattaatgtgtacgctgaactggaagggtatgatcgtaaagaaatcatgcgcaaaacagagaacatttataacactactctggaaatcctttcgaacgctaaaactcataacatcaccaccaatcacgcagctttaaacattgctcagaaccgtatcgacactcggaagaaagagaacaaacgt

SEQ ID NO: 143 - DNA, 1098 bp, Artificial Sequence
  Synthetic polynucleotide
atgacactggagatctttgaataccttgaaaagtatgactacgagcaagtagtcttctgccaggataaagaaagtggcttgaaagcaattatagccatccacgacactacgctgggtcctgctttagggggcactcgcatgtggacctatgatagcgaagaagctgcgatcgaagatgctctacgtctggcgaaaggtatgacctacaaaaatgcagctgccggtctcaacttcggcggtgcgaagactgttattatcggcgacccccgaaaagacaaatccgaggcaatgtttcgtgcgctgggacgctacattcagggtctgaacggcagatacatcaccgctgaagatgtgggtacaaccgttgatgacatggacattatccatgaagaaactgacttcgtgaccgggatctcaccaagcttcggctcttctggtaacccgtccccggttacggcatatggcgtataccgcggcatgaaagctgctgcgaaagaggcctttggtactgataacctggaagggaaggtaattgcggttcagggtgtcggtaatgtggcttatcacctctgtaaacatctgcacgctgaaggcgctaagctgattgttaccgatatcaacaaagaggcagtccaaagggccgttgaggaatttggagcatcggcagtggaaccaaacgaaatctacggtgtagagtgcgatatctacgctccgtgcgccctgggcgcgactgttaatgatgaaaccatcccgcagctgaaagcgaaagtaattgcaggctccgccaacaaccagctaaaagaagaccgtcacggtgacatcattcatgaaatgggtatcgtttacgctccggactacgtgataaacgcgggcggtgttattaacgtggcagatgaactgtatggctataaccgtgagcgtgctctgaagcgtgttgaatctatatatgatactatcgctaaggtcatcgaaatcagcaaacgtgatggtatcgctacctacgtagctgccgaccgtctcgctgaagagcgcatcgcctctctgaaaaattctaggagcacttacctgcgtaacggtcacgacataatcagccgccgc

SEQ ID NO: 144 - DNA, 1101 bp, Artificial Sequence
  Synthetic polynucleotide
atgtcggacctgacaattttaaacaagtccatcgatcgcggtccggtcttcaatagcgaggcgtttaaaggccacgaacaactcgtattctgccaggatgaagaaactgggctgaaagctatcattggcatccattctacgaccctgggtccagcacttggtggcactagaatgtggaactatgagaacgaagccgacgctatccgtgatgcattgcgtctgtcacgtggcatgacctacaaagcttctattagtggtctggacctcggaggtggcaaggcggtgatcatcggcgacagccgcaaagataaaactgatgcactgatgcgtaaattcggtgaatacgttaattccttaagcggacgctatataaccgctgaagacgttggtattaacacccacgacatggagatggtaaaactggaaactaaccatgttactggtatcccggaacacatgggcggctctggcgacccctctcctgtgactgcgtacggtgtctttatggggatgaaggcttccgcgcagcagaaatggggtagcgataaccttgccggcaaaaaagttctagtgcagggcatcggtcatgttggagaaacgctggttaagtacctgaccgatgagggtgcaatcgttacgattaatgacattcacgaagaccggatcgtagagatctctgctaaatataacactcaagtgtaccgtggcaacaacctgttcgaagtcgaaatggatatttatgctccgtgtgctctgggtgccaccgtgaatagcaagaccatcgaaatgatgaaatgcgacatcattgcgggtgcggcaaacaaccagctcgaagatgaagtagtccacggccagatggtgaaagacaaaggtatcttgtacgcaccggattttctgataaacgccggcggtctgatcaatgtataccgtgaaattgctgggtatgatcaagcagaagcgatgcgccgtacggagaacatctacgataccactctgcgcatcttcaaactgtctcaggaacgtaacatctcaactcatgaggctgctttaaagattgctgaagaacgcgttgctttgaaaaaggcagagctggcaaatgcc

SEQ ID NO: 145 - DNA, 1059 bp, Artificial Sequence
  Synthetic polynucleotide
atgacagtgttcacccatcctgagtttgatcaccacgaacatctgactttctgttgcgacccggaaacgggtctccgcgccatcattgctgtacacaatacctcccgtgggccggcgttaggcggttgccggatgtttccatatgcatctgacgaagaagctttgcgtgatgttcttcgtctgtcgcgcggcatgacttacaaaagtgcactggctaacctggacctgggtggcggcaagagcgtcatcattggtgattctcgtgagcacaaaaccgaagcgctgctggaaagcatgggacgcttcctggagcaactaggtggcctgtacatcgcggctgaagactcaggtacttctgtagcagatcttaaaataatgggtcgtcagaccactcatgttgcaggaatcagggatcgccccggattcgacggcaaaccatccaacggtgacccgagcccggctacagcctggggcacctttgttggcattcaggctgccgtgaagcacaaactgggtcgttcggacctggagggtctgaaagtggctgttcagggcatcggtaacgttggttaccgtctggcgcgccatctgcgagaagcgggcgctgaactctgggtttatgatatccaccaggatcagatggatagagccgtcgctgagttcggcgcaacgcccgcttctgctgaagacatattattcctgccggtagacgtcgtagcaccgtgtgccatgggtgccgtgttgaacgatgcatccatcgctcgtttgcaggcgcctattgttgctggcgcagcgaacaatcaactggctagcccggcccacgacgaagttctgtggaagcacggtgtgctgtacgcgccggactttgttatcaacgcgggcggcattatcgatgtgttctatgagcgcactggtccggatccggaagctgttcgtcaacacgttaataccatcggccagactttggaagaaatcttccagcgctctgcccgggatggtcttccaacggggcagattgctgaccagctcgctgaggaacgttttcgtcatatccctcgt

SEQ ID NO: 146 - DNA, 1092 bp, Artificial Sequence
  Synthetic polynucleotide
atggagatcttcaagtatatggaaacctacgactacgaacaactggtcttttgtcaggataaaacttctggccttaaagcaattatcgcgatacatgacacgactctggggccagctttgggtggcacacgtatgtggacctacgctagtgaagaagccgctattgaggatgcattacgcctagcgaaaggtatgacttataaaaatgccgctgctggtctgaacctgggcggcggtaagaccgtaatcatcggagatcctctcaaagacaaaaacgaagagatgttccgtgcgttcggtaggtttatccagggcctgaacgggcgctacatcaccgcagaagacgttggtactacggtggctgatatggacctgattcacgaagaaaccaactacgttaccggcatatccccggctttcggttcgtctggcaatccctccccggtgactgcgtatggtgtataccgtggcatgaaagccgcagctatggaagcatttggcagcgacagcctggaaggtaagcgcatcgctgtgcagggggttggtaacgttgcatataacctctgccgtcacctgcatgaagagggcgcgaaactgattgttaccgatatcaataaagcggccgtagatcgtgtggtcgaagagttcggtgctacagcggttaacacggatgaaatttactcacaagacgtagacatctttgcaccgtgcgctctgggtgccatcatcaacgatgaaactattccgcagctgaaagctaaggtagttgcaggtgcggcaaacaaccagttaaaagaaactaagcacggcgaccagctgcacgaactgggcatcgtttatgctccggattacgtgatcaacgcgggcggggtcattaacgttgcggacgagctgtatggatacaatcgagaacgtgcgatgaaacgggtggaaaccgtctacgacaatattgctaaagttatggaaatctctcggacccagggtattcctacttatgtcgccgcagatcgtctggctgaagaacgcatcgcgcgtgttggtaagagccgttctaacttcttactgaacgaaaaacatattctgagcggcaga

SEQ ID NO: 147 - DNA, 1092 bp, Artificial Sequence
  Synthetic polynucleotide
atggagatcttcacatatatggaaaagtacgactacgaacaactggtcttttgtcaggataaaaatagtggtctcaaagccattatcgctatacacgatacgactttagggccggcgttgggcggtacccgcatgtggacctatgactctgaagaggaagcaattgaagacgctcttcgtctggcaaaaggcatgacttacaaaaacgctgcggctggtctgaacctgggcggcggtaaaaccgtaatcatcggtgatcctcgtaaggacaaaaacccggaaatgttccgagcatttgggcgctacattcagggcctgaacggcagatatatcaccgcggaggatgtgggtactactgaagaggatatggacctgatccatatggaaacagacttcgttaccggagttagcgaagaatccggatcgtctggtaatccctccccagtaaccgcttacggcgtttacaagggcatgaaagccagcgctaaagaggccttcggttcagatagcctggaaggtaaaaaggtggcggttcagggtgtgggtaacgttgcttttactctgtgcaaatacctacacgaagaaggcgcaaaactcatcgtcactgacattaacgaagatgcggtaaagcgtgctgtggacgctttcggcgctgaagcggtatctccggaggaaatttatgatgttgattgcgacatctacgctccgtgcgcactgggggccacgatcaacgatgaaaccattcctcgcatcaaagcaaaagtcatcgctggctctgcgaacaatcagcttaaatcctccaaacacggtgaaataattcatgagaaaggcatcgtttatgccccggactacgttatcaacgcgggtggtgtgatcaacgtagctgacgagctgaacggctataaccaagaacgcgcgatgaaaaaggttgagactatttacgattcactgtccaaagttttcgaaatctctcgtcgtgataatattccgagctatgtcgcggctgatcgtatggcggaggaacgtattgaaacaatgaaaaagagccgtaaccagtttctgttgaatgagcaccatatcctgagtcgtcgc

SEQ ID NO: 148 - DNA, 1098 bp, Artificial Sequence
  Synthetic polynucleotide
atgacactggagatctttgaataccttgaaaagtatgactacgagcaagtagtcttctgccaggataaagaaagtggcttgaaagcaattatagccatccacgacactacgctgggtcctgctttagggggcactcgcatgtggacctatgatagcgaagaagctgcgatcgaagatgctctacgtctggcgaaaggtatgacctacaaaaatgcagctgccggtgaaaacctgggcggtgcgaagactgttattatcggcgacccccgaaaagacaaatccgaggcaatgttccgtgcgctgggacgctacattcagggtctgaacggcagatacatcaccgctgaagatgtgggtacaaccgttgatgacatggacattatccatgaagagactgacttcgtgaccgggatctcaccaagctttggctcttctggtaacccgtccccggttacggcatatggcgtataccgcggcatgaaagctgctgcgaaagaagccttcggtactgataacctcgaagggaaggtaattgcggttcagggtgtcggtaatgtggcttatcacctctgtaaacatctgcacgctgagggcgctaagctgattgttaccgatatcaacaaagaagcagtccaaagggccgttgaggaatttggtgcgtcggcagtagagccgaatgaaatctacggcgttgaatgcgacatttacgccccgtgtgcgctgggtgccacggtcaacgatgaaactatccctcagctgaaagctaaggttatcgctggcagcgccaacaaccagctgaaagaagaccgtcatggagatatcatacacgaaatgggtatcgtgtatgcgccggattacgtgatcaacgcagggggcgttattaatgtggcggacgaattatacggctataaccgtgaacgcgctttgaaacgggttgaatctatttacgatactatcgcaaaagtaatcgaaatcagcaaacgtgatggtattgctacctacgtcgcagctgaccgcttggctgaagagcggatcgcatctttaaagaactcccgtagcacctatctgcgcaacggccacgatatcatatcgcgacgt

SEQ ID NO: 149 - DNA, 1104 bp, Artificial Sequence
  Synthetic polynucleotide
atgaacgcggcattcactaccagcaatgaactgcaaaagatggacccagtatttgggcagacgtccttcgatgaccacgagcagatcgttttctgcaacgataaagatacaggccttaaagctattatcggtattcataactcagtgatgggcccggctctcggtggtacccgtatgtataactactcgaatgaatgggaagccttgaacgacgttttacgcctgtctcgaggcatgacttttaaagcagctatcaccggtctgaacataggcggaggtaaagcggtcatcatcggcgaccccaagactcagaaaaccccggagctgatgagaaaattcggcgaatttgttcactctctgagcggtcgttacattactgctgaagatatgggcatggagacgcgcgacatggatatcgtaagggacgtgaccccttatgttactggtatctccgaagaacgtggcggcgcaggaaacccgtccccggttacagcctacggtgtattcatggggatgaaagcggcggctaagcgtcagtttggctctgataatctgagtggtaaaaaagtcctggtggaaggtattggtcatgtgggtgagaccttagttgcatacctagttaaggaaggcgctattgtgactatcgcggacattaacgagcagaaactgaacgaagttgctgcaacctataataccaccatattccgcggcgaagatctgtacgccgctgacgtcgatatctatgctccgtgtgcaatgggtgccacaatcaacaacgacaccgtatacaaaattaaagctaaagtaatcgccggggctgcgaacaatcaactggccgatgaaaacatccacggtgcgatcctgcaagagcgtggcatcttgtacgcgccagacttcctgatcaacgcaggcggtatcattaacgtgtacgctgaactggctcactatgataaagcagaaatcactcgtcgcacggaaaacatttatgatactactctggaaatctttgatttcgctattgctaacaagatgaccactcatacggcagctttaacgatcgctcagaaccgtatcaatcagcgcaagatcgagaacagccgtcgc

SEQ ID NO: 150 - DNA, 1044 bp, Artificial Sequence
  Synthetic polynucleotide
atgaacgtgttcgagcatttgcagcaacacgactatggagaagtacactttgcccgcgatgcggctacgggtctgcaagcaatcgttgcgattcatgacacccgtctggggccagctcttggtggctgccgtttcatccactaccctcacgaagaactggctttaatagatgcactccgactggcacgcggcatgacttacaaagctgccattactggtatcccccatggcggcggtaagtccgtcatcattcggccgccgcgtgcgtttgaccgcggtgcgctgttccgtgctttcggcagatttgttgatggtctgggcgggcgttacatcacagccgaggactctggtactagcatggaagatatggaaaccattcgttcggtaaccaaacacgtgaccggcgtgaaaccggaacacggtggctctggcgatccatccccgtatactgcgctgggtgttcgccgtgggatcgaagcttgtgttaagttcgtctacaaacgcgacagcatcgaaggtctgcatgttgctgtgcagggagttggccatgtaggttattggctttgcaaacagctgcacgatcttggcgcaaaactgaccgttgccgacatcgatcctctgaaagcagagcgtgcgcaccgtgagctaggtgctgaagtagtaccgctggaccagattttcagtgttgattgcgaggtgtttgcaccgtgtgctctgggttctgctctgaatgatgactcaatcccgaaactgaagtgcaaaatagttgcaggtgcggcaaacaaccagttagccgaaactcgacacggcgacgctctgatgcatcgcggcatcctctacgctccggactatgcgatcaacgcgggtgggctggttaatgttgcgcaggaacacgctggctacgatgaacagaaaagccgtgaacgcgtgttaaaaatttacgacactattttggaaatcgcagaacgtgctgagcgtgccatgcaacctacctatcgcatcgcagatacgatcgttgaagaaaagctggcgcgtgctgctcgg

SEQ ID NO: 151 - DNA, 1053 bp, Artificial Sequence
  Synthetic polynucleotide
atgtcggtgttcgaccatgctgcgtacgataagcacgagcacgtagccttttatcacgacgtcaaaagcggtctgaaagcaatcattgctgtgcataatacgaacttagggccgtccttgggcggttgccgcatgtggccctacgcgtctagtgcagaagctcttactgatgttctccgtctgtctaaaggcatgtcctataaaagcgctatggccaacctgaagctgggtggcggcaaatcagttatcattggtgaccctcgtaaacacaaaagcgcggatatgatgctggcaatgggagacttcgttcagtctctgggtggcaagtacatcagcgctgaagattccggtatctctgtaagtgatctacaaacaatggctcagcggtcggactacatagcgggcacccaggccaaatataggtacgacggtggcccagctgatggcaacccggcgccgtctaccgcatacggagtatttatgggtttaaaggctagcgttgcatatgggctgaaatccgacctgaacggtgttagcgtcgcgattcagggtctgggccatgtgggtttccgcctggccgaacacctccacaaagaaggagctaaactgttcgtcactgatatctacccggacaatctggataaagcggttgagcaattcggcgcaaccgtggttactccggacgaaatctttggcctggacgttgacgtatttgctccgtgtgccctaggggctgctattaacgatcagactatcgatcagatcaaggctcgtgttatcgcgggtgcagctaacaaccaactggcggaagaaagacatggccagatgctgatggataaaggtattctgtacgctccggactacgtgattaacgcaggcggtgttatagacatctatcatcagaagcagggctcttccgcggaagctctgcgcaaacacatcgaggggattggtgatacccttacggaaatctatcagaaagcagcccaacagggcctcccaaccaacatcgaagcgaatcgtattgccgagcagcgtttcttagcaggtgct

SEQ ID NO: 152 - DNA, 1128 bp, Artificial Sequence
  Synthetic polynucleotide
atgaacgcgccgatcaattctacgattaaccagcccctgactgacaccaacgaacaaaacaaggagccgatgaacatgtcagtattctcccacccagaatttgataatcatgaacagttaactttctttagcgatgagaaatcggggttgaaagcaatcatcgctgttcacaacaccaatctcggtccggccctgggcggttgtcgcatgtggcattatgcttctgacgaagaagcacttagagacgtcctgcgtctgtcccgtggcatgacatacaaaagtgcgctggctaacctgaagctgggaggtggcaaatctgtgattataggtgatccgcgccagcacaaatctgaagctctgctggaaatgatgggccgttgccttgagcgcactggtggccagtacatcgcggccgaagatagcggaaccagcgttcctgacttacaagtgatgagccgtttcaccaacaacgtagcaggtattactgaacgaaccggcatcgacggtctgccgtgcaatggcgacccatcccctgcgactgcatatggttgtttcgttggcctgaaagctgctgtcaaacaccagtttggccgtgatgacctctctggtctgaaggttgctatccagggggtaggtaacgttggttaccgtttggccaaacacctgcgccaggctggtgcagagctgttcgtcacagatatacatgaggaacaagtgaggctggccgttacggaactaggcgctactgcggttgcgcaggaagaaatcttgggccttgacgtggatgtactatctccgtgcgctctgggcgccgtgctcaacgactttagtatcccacagattaaagcgaaagttatcgcaggggcggctaacaaccaactggctctggcgaagcacgatcagctgctgcaacagcgcggtattctgtacgctccggattatgtgattaatgctggcggtatcatcgatatctactacgaacgtgttggtcatgaacacaccaaagttcgtgcacatattgataccatcgcggacactttacaggagattttcaggcgtgctgacgactcgggccgtcctacgggggaaatcgccaacactctggcagaagagcgcttcatgacccgc

SEQ ID NO: 153 - DNA, 1047 bp, Artificial Sequence
  Synthetic polynucleotide
atgtcgatcttctcagatcctgcgtttgacaaccatgagcaagtggtcttcgccagcgacagggaaacgggtctgaaggctattatcgctgtacacaatacacacttagggccgtccttgggcggttgccgcatgtggccatatgcatctgaacaggatgcaattcatgacgttcttcgtctatctcgcggcatgacttacaaaagtgctctggttaacctcccgctgggtggcggcaaaagcgtcatcatcggtgatccccgtactcagaaaaccccggaactgttccgtgcggtaggacgtgcggttgagcgcctgaacggtcggtacatagtggctgaagacgttggtacctctccggcagatatggccgaaattgctcgtcagacccaccacgtgggcggcatcaacgatggcaaagacccggcccgtactggtgatccttccccgtttacggcgtatggcgttttcatcggcctgaaggaagctgtaaaacataaaactggtaacgacgacctgaaagacatgcgcgttgcggttcagggtctgggtaatgtaggctttcacctctgtgagctgctgcataacgcaggggctgaactgattgtcgcagatatcaatgcatcggccgtggatagagctgttgaccgtttcggtgcgaaggctgtaagcgttgatgaaatcctgtctgttaacgcagacgttctggccccatgcgcgcttggcggtataattaacgatacctccatcgctagcctgaaagccggaattatcgctggagcggccaacaatcaactggaagctgaccgccacggggatatcctgcgtgagatgggtgtgttgtacgcgccggattacgtgatcaacgctgggggcgtcgtagaagtgcactattgccgtgagggccgcccggtatccgaaaccaaccgacacattgaaggtattggggctactgttcgcgaaatctttgaacgtgcggaccgtgaaaacaaatctactagcttcatcgctgatagattagcagaagagaggttcggtaaaaaagca

SEQ ID NO: 154 - DNA, 1098 bp, Artificial Sequence
  Synthetic polynucleotide
atgacactggagatctttgaataccttgaaaagtatgactacgagcaagtagtcttctgccaggataaagaaagtggcttgaaagcaattatagccatccacgacactacgctgggtcctgctttagggggcactcgcatgtggacctatgatagcgaagaagctgcgatcgaagatgctctacgtctggcgaaaggtatgacctacaaaaatgcagctgccggtctcaacctgggcggtgcgaagactgttattatcggcgacccccgaaaagacaaatccgaggcaatgttccgtgcgctgggacgctacattcagggtctgaacggcagatacatcaccgctgaagatgtgggtacaaccgttgatgacatggacattatccatgaagaaactgacttcgtgaccgggatctcaccaagctttggctcttctggtaacccgtccccggttacggcatatggcgtataccgcggcatgaaagctgctgcgaaagaggccttcggtactgataacctggaagggaaggtaattgcggttcagggtgtcggtaatgtggcttatcacctctgtaaacatctgcacgctgaaggcgctaagctgattgttaccgatatcaacaaagaggcagtccaaagggccgttgaggaatttggtgcgtcggcagtagaaccgaatgaaatctacggcgttgaatgcgacatttacgccccgtgtgcgctgggtgccacggtcaacgatgaaactatccctcagctgaaagctaaggttatcgctggcagcgccaacaaccagctgaaagaagaccgtcatggagatatcatacacgagatgggtatcgtgtatgcgccggattacgtgatcaacgcagggggcgttattaatgtggacgacgaattatacggctataaccgtgaacgcgctttgaaacgggttgaatctatttacgatactatcgcaaaagtaatcgaaatcagcaaacgtgatggtattgctacctacgtcgcggctgatcgcttggctgaagagcggatcgcatctttaaagaactcccgtagcacctatctgcgcaacggccacgacatcatatcgcgacgt

SEQ ID NO: 155 - DNA, 1098 bp, Artificial Sequence
  Synthetic polynucleotide
atgacactggagatctttgaataccttgaaaagtatgactacgagcaagtagtcttctgccaggataaagaaagtggcttgaaagcaattatagccatccacgacactacgctgggtcctgctttagggggcactcgcatgtggacctatgatagcgaagaagctgcgatcgaagatgctctacgtctggcgaaaggtatgacctacaaaaatgcagctgccggtctcaacctgggcggtgcgaagactgttattatcggcgacccccgaaaagacaaatccgaggcaatgttccgtgcgctgggacgctacattcagggtctgaacggcagatacatcaccgctgaagatgtgggtacaaccgttgatgacatggacattatccatgaagaaactgacttcgtgaccgggatctcaccaagctttggctcttctggtaacccgtccccggttacggcatatggcgtataccgcggcatgaaagctgctgcgaaagaggccttcggtactgataacctggaagggaaggtaattgcggttcagggtgtcggtaatgtggcttatcacctctgtaaacatctgcacgctgaaggcgctaagctgattgttaccgatatcaacaaagaggcagtccaaagggccgttgaggaatttggtgcgtcggcagtagaaccgaatgaaatctacggcgttgaatgcgacatttacgccccgtgtgcgctgggtgccacggtcaacgatgaaactatccctcagctgaaagctaaggttatcgctggcagcgccaacaaccagctgaaagaagaccgtcatggagatatcatacacgagatgggtatcgtgtatgcgccggattacgtgatcaacgcagggggccagattaatgtggcggacgaattatacggctataaccgtgaacgcgctttgaaacgggttgaatctatttacgatactatcgcaaaagtaatcgaaatcagcaaacgtgatggtattgctacctacgtcgcagctgaccgcttggctgaagagcggatcgcatctttaaagaactcccgtagcacctatctgcgcaacggccacgatatcatatcgcgacgt

SEQ ID NO: 156 - DNA, 1098 bp, Artificial Sequence
  Synthetic polynucleotide
atgacactggagatctttgaataccttgaaaagtatgactacgagcaagtagtcttctgccaggataaagaaagtggcttgaaagcaattatagccatccacgacactacgctgggtcctgctttagggggcactcgcatgtggacctatgatagcgaagaagctgcgatcgaagatgctctacgtctggcgaaaggtatgacctacaaaaatgcagctgccggtctcaacctgggcggtgcgaagactgttattatcggcgacccccgaaaagacaaatccgaggcaatgttccgtgcgctgggacgctacattcagggtctgaacggcagatacatcaccgctgaagatgtgggtacaaccgttgatgacatggacattatccatgaagaaactgacttcgtggaggggatctcaccaagctttggctcttctggtaacccgtccccggttacggcatatggcgtataccgcggcatgaaagctgctgcgaaagaagccttcggtaccgataacctggaagggaaggtaattgcggttcagggtgtcggtaatgtggcttatcacctctgtaaacatctgcacgctgagggcgctaagctgattgttactgatatcaacaaagaagcagtccaaagggccgttgaggaatttggtgcgtcggcagtagagccgaatgaaatctacggcgttgaatgcgacatttacgccccgtgtgcgctgggtgccacggtcaacgatgaaactatccctcagctgaaagctaaggttatcgctggcagcgccaacaaccagctgaaagaagaccgtcatggagatatcatacacgaaatgggtatcgtgtatgcgccggattacgtgatcaacgcagggggcgttattaatgtggcggacgaattatacggctataaccgtgaacgcgctttgaaacgggttgaatctatttacgatactatcgcaaaagtaatcgaaatcagcaaacgtgatggtattgctacctacgtcgcagctgaccgcttggctgaagagcggatcgcatctttaaagaactcccgtagcacctatctgcgcaacggccacgatatcatatcgcgacgt

SEQ ID NO: 157 - DNA, 1098 bp, Artificial Sequence
  Synthetic polynucleotide
atgacactggagatctttgaataccttgaaaagtatgactacgagcaagtagtcttctgccaggataaagaaagtggcttgaaagcaattatagccatccacgacactacgctgggtcctgctttagggggcactcgcatgtggacctatgatagcgaagaagctgcgatcgaagatgctctacgtctggcgaaaggtatgacctacaaaaatgcagctgccggtctcaacctgggcggtgcgaagactgttattatcggcgacccccgaaaagacaaatccgaggcaatgttccgtgcgctgggacgctacattcagggtctgaacggcagatacatcaccgctgaagatgtgggtacaaccgttgatgacatggacattatccatgaagaaactgacttcgtgaccgggatctcaccaagctttggctcttctggtaacccgtccccggttacggcatatggcgtataccgcggcatgaaagctgctgcgaaagaggccttcggtactgataacctggaagggaaggtaattgcggttcagggtgtcggtaatgtggcttatcacctctgtaaacatctgcacgctgaaggcgctaagctgattgttaccgatatcaacaaagaggcagtccaaagggccgttgaggaatttggtgcgtcggcagtagaaccgaatgaaatctacggcgttgaatgcgacatttacgccccgtgtgcgctgggtgccacggtcaacgatgaaactatccctcagctgaaagctaaggttatcgctggcagcgccaacaaccagctgaaagaagaccgtcatggagatatcatacacgagatgggtatcgtgtatgcgccggattacgtgatcaacgcagggggcgttattaatgtggcggacgaagattacggctataaccgtgaacgcgctttaaaacgggttgaatctatttacgatactatcgcaaaagtaatcgaaatcagcaaacgtgacggtattgctacctacgtcgcagctgatcgcttggctgaagagcggatcgcatctttaaagaactcccgtagcacctatctgcgcaacggccacgacatcatatcgcgacgt

SEQ ID NO: 158 - DNA, 1098 bp, Artificial Sequence
  Synthetic polynucleotide
atgacactggagatctttgaataccttgaaaagtatgactacgagcaagtagtcttctgccaggataaagaaagtggcttgaaagcaattatagccatccacgacactacgctgggtcctgctttagggggcactcgcatgtggacctatgatagcgaagaagctgcgatcgaagatgctctacgtctggcgaaaggtatgacctacaaaaatgcagctgccggtctcaacctgggcggtgcgaagactgttattatcggcgacccccgaaaagacaaatccgaggcaatgttccgtgcgctgggacgctacattcagggtctgaacggcagatacatcaccgctgaagatgtgggtacaaccgttgatgacatggacattatccatgaagaaactgacttcgtgaccgggatctcaccaagctttggctcttctggtaacccgtccccggttacggcatatggcgtataccgcggcatgaaagctgctgcgaaagaggccttcggtactgataacctggaagggaaggtaattgcggttcagggtgtcggtaatgtggcttatcacctctgtaaacatctgcacgctgaaggcgctaagctgattgttaccgatatcaacaaagaggcagtccaaagggccgttgaggaatttggtgcgtcggcagtagaaccgaatgaaatctacggcgttgaatgcgacatttacgccccgtgtgcgctgggtgccacggtcaacgatgaaactatccctcagctgaaagctaaggttatcgctggcagcgccaacaaccagctgaaagaagaccgtcatggagatatcatacacgagatgggtatcgtgtatgcgccggattacgtgatcaacgcagggggcgttattaatgtggcggacgaaacttacggctataaccgtgaacgcgctttaaaacgggttgaatctatttacgatactatcgcaaaagtaatcgaaatcagcaaacgtgatggtattgctacctacgtcgcagctgaccgcttggctgaagagcggatcgcatctttaaagaactcccgtagcacctatctgcgcaacggccacgatatcatatcgcgacgt

SEQ ID NO: 159 - DNA, 1098 bp, Artificial Sequence
  Synthetic polynucleotide
atgacactggagatctttgaataccttgaaaagtatgactacgagcaagtagtcttctgccaggataaagaaagtggcttgaaagcaattatagccatccacgacactacgctgggtcctgctttagggggcactcgcatgtggacctatgatagcgaagaagctgcgatcgaagatgctctacgtctggcgaaaggtatgacctacaaaaatgcagctgccggtcataacctgggcggtgcgaagactgttattatcggcgacccccgaaaagacaaatccgaggcaatgttccgtgcgctgggacgctacattcagggtctgaacggcagatacatcaccgctgaagatgtgggtacaaccgttgatgacatggacattatccacgaagaaactgacttcgtgaccgggatctcaccaagctttggctcttctggtaacccgtccccggttacggcatatggcgtataccgcggcatgaaagctgctgcgaaagaggccttcggtactgataacctcgaagggaaggtaattgcggttcagggtgtcggtaatgtggcttatcatctctgtaaacacctgcatgctgaaggcgctaagctgattgttaccgatatcaacaaagaggcagtccaaagggccgttgaggaatttggtgcgtcggcagtagaaccgaatgaaatctacggcgttgaatgcgacatttacgccccgtgtgcgctgggtgccacggtcaacgatgaaactatccctcagctgaaagctaaggttatcgctggcagcgccaacaaccagctgaaagaagaccgtcacggagatatcatacacgagatgggtatcgtgtatgcgccggattacgtgatcaacgcagggggcgttattaatgtggcggacgaattatacggctataaccgtgaacgcgctttgaaacgggttgaatctatttacgatactatcgcaaaagtaatcgaaatcagcaaacgtgatggtattgctacctacgtcgcagctgaccgcttggctgaagagcggatcgcatctttaaagaactcccgtagcacctatctgcgcaacggccatgatatcatatcgcgacgt

SEQ ID NO: 160 - DNA, 1098 bp, Artificial Sequence
  Synthetic polynucleotide
atgacactggagatctttgaataccttgaaaagtatgactacgagcaagtagtcttctgccaggataaagaaagtggcttgaaagcaattatagccatccacgacactacgctgggtcctgctttagggggcactcgcatgtggacctatgatagcgaagaagctgcgatcgaagatgctctacgtctggcgaaaggtatgacctacaaaaatgcagctgccggttggaacctgggcggtgcgaagactgttattatcggcgacccccgaaaagacaaatccgaggcaatgttccgtgcgctgggacgctacattcagggtctgaacggcagatacatcaccgctgaagatgtgggtacaaccgttgatgacatggacattatccatgaagaaactgacttcgtgaccgggatctcaccaagctttggctcttctggtaacccgtccccggttacggcatatggcgtataccgcggcatgaaagctgctgcgaaagaggccttcggtactgataacctcgaagggaaggtaattgcggttcagggtgtcggtaatgtggcttatcacctctgtaaacatctgcacgctgaaggcgctaagctgattgttaccgatatcaacaaagaggcagtccaaagggccgttgaggaatttggtgcgtcggcagtagaaccgaatgaaatctacggcgttgaatgcgacatttacgccccgtgtgcgctgggtgccacggtcaacgatgaaactatccctcagctgaaagctaaggttatcgctggcagcgccaacaaccagctgaaagaagaccgtcatggagatatcatacacgagatgggtatcgtgtatgcgccggattacgtgatcaacgcagggggcgttattaatgtggcggacgaattatacggctataaccgtgaacgcgctttgaaacgggttgaatctatttacgatactatcgcaaaagtaatcgaaatcagcaaacgtgatggtattgctacctacgtcgcagctgaccgcttggctgaagagcggatcgcatctttaaagaactcccgtagcacctatctgcgcaacggccacgatatcatatcgcgacgt

SEQ ID NO: 161 - DNA, 1098 bp, Artificial Sequence
  Synthetic polynucleotide
atgacactggagatctttgaataccttgaaaagtatgactacgagcaagtagtcttctgccaggataaagaaagtggcttgaaagcaattatagccatccacgacactacgctgggtcctgctttagggggcactcgcatgtggacctatgatagcgaagaagctgcgatcgaagatgctctacgtctggcgaaaggtatgacctacaaaaatgcagctgccggtatgaacctgggcggtgcgaagactgttattatcggcgacccccgaaaagacaaatccgaggcaatgttccgtgcgctgggacgctacattcagggtctgaacggcagatacatcaccgctgaagatgtgggtacaaccgttgatgacatggacattatccatgaagaaactgacttcgtgaccgggatctcaccaagctttggctcttctggtaacccgtccccggttacggcatatggcgtataccgcggcatgaaagctgctgcgaaagaggccttcggtactgataacctcgaagggaaggtaattgcggttcagggtgtcggtaatgtggcttatcacctctgtaaacatctgcacgctgaaggcgctaagctgattgttaccgatatcaacaaagaggcagtccaaagggccgttgaggaatttggtgcgtcggcagtagaaccgaatgaaatctacggcgttgaatgcgacatttacgccccgtgtgcgctgggtgccacggtcaacgatgaaactatccctcagctgaaagctaaggttatcgctggcagcgccaacaaccagctgaaagaagaccgtcatggagatatcatacacgagatgggtatcgtgtatgcgccggattacgtgatcaacgcagggggcgttattaatgtggcggacgaattatacggctataaccgtgaacgcgctttgaaacgggttgaatctatttacgatactatcgcaaaagtaatcgaaatcagcaaacgtgatggtattgctacctacgtcgcagctgaccgcttggctgaagagcggatcgcatctttaaagaactcccgtagcacctatctgcgcaacggccacgatatcatatcgcgacgt

SEQ ID NO: 162 - DNA, 1098 bp, Artificial Sequence
  Synthetic polynucleotide
atgacactggagatctttgaataccttgaaaagtatgactacgagcaagtagtcttctgccaggataaagaaagtggcttgaaagcaattatagccatccacgacactacgctgggtcctgctttagggggcactcgcatgtggacctatgatagcgaagaagctgcgatcgaagatgctctacgtctggcgaaaggtatgacctacaaaaatgcagctgccggtctcaacctgggcggtgcgaagactgttattatcggcgacccccgaaaagacaaatccgaggcaatgttccgtgcgctgggacgctacattcagggtctgaacggcagatacatcaccgctgaagatgtgggtacaaccgttgatgacatggacattatccatgaagaaactgacttcgtgaccgggatctcaccaagctttggctcttctggtaacccgtccccggttacggcatatggcgtataccgcggcatgaaagctgctgcgaaagaggccttcggtactgataacctggaagggaaggtaattgcggttcagggtgtcggtaatgtggcttatcacctctgtaaacatctgcacgctgaaggcgctaagctgattgttaccgatatcaacaaagaggcagtccaaagggccgttgaggaatttggtgcgtcggcagtagaaccgaatgaaatctacggcgttgaatgcgacatttacgccccgtgtgcgctgggtgccacggtcaacgatgaaactatccctcagctgaaagctaaggttatcgctggcagcgccaacaaccagctgaaagaagaccgtcatggagatatcatacacgagatgggtatcgtgtatgcgccggattacgtgatcaacgcagggggcgttattaatgtggcggacgaaatgtacggctataaccgtgaacgcgctttaaaacgggttgaatctatttacgatactatcgcaaaagtaatcgaaatcagcaaacgtgatggtattgctacctacgtcgcagctgaccgcttggctgaagagcggatcgcatctttaaagaactcccgtagcacctatctgcgcaacggccacgatatcatatcgcgacgt

SEQ ID NO: 163 - DNA, 1104 bp, Artificial Sequence
  Synthetic polynucleotide
atgccaagcttcgagcgtttgtacaaggatggccatgaagaagtgatttttttctcggacccgtcttgcaatctgaaagccatcgtcgctatacacaacacggttttagggccggcgcttggtggtacccgcatgtggccttatgaatctgaggaagaagcactcaacgacgttctgcgtctgtccagaggcatgacttacaaaaacgctgtagccggtctgaacctgggcggcggtaaagcggtcatcatcggtgatcccgaaaaagacaagagtgaggctctgttccgcagctatgggcgttttatggaatccctgaacggccggtacattacagcagaagatgtaaatatctctgtggacgatattgaacacgttttcactgagaccaacaacgtagcaggagttgcggaaatccatggaggctcaggtaacccatctccttggaccgctaggggcgtttttcgcggtatcgaggctgcatgtatgaaagtatacggtaatcgtagcccgaaaggcaaagtggttgcgcttcagggtgcaggttccgttggccgttatctgggtgaatacctgtacaacgaaggcgctgaggtttacgtgtgcgacatcaacgaaaaaaacctggagctgttcaaggaaaaagtgccgaatgctaaggtagtaggcatcgatgaaatttatgacgttaaaatggacatatatgcaccgtgtgctctgggtgccactatcaacgatgataccattgaccgtctacaatgcaaaatcgttgccggtgcggcgaacaaccagttagctgaaaatcgccacggtaagattctgaaagaacgcggcgtcctctacgctccggattatctgatcaacgcgggcggggtcatgaacgttagcatcgaatttgagggatggtccgaagataaagctattcgcatggttgattcaatttacgacactactctggaagtgttcaatatcagcgaagaacaggatatcccagtctaccaggcaaccgacatcttggctgaatctcggatcgagtctattaagaacattcaagggaaattcctgggccatgtaggtcaccgtttcccgggacgtaaaaaacgt

SEQ ID NO: 164 - DNA, 1104 bp, Artificial Sequence
  Synthetic polynucleotide
atgatcgagagcggccaatttcagcgctatctgacccggtctgacaataaccgtcgaattataaaagtggctgtattcaaccaggtcgaatttgataaccatgaacaggttgttttctgttccgacgaaaagtcgggtttgaaagccatcatcgcagtacactctacgaaattaggacccgcggtgggcggttgccgtctttgggattacgctgaagatcaggacgcggtttacgatgtgctacgtctgtcaaagggtatgacttataaaaacgcagttgcccgcctgccattcgggggcggcaaaagcgtcattatcggtgacgctaaaagcatcaaatccgaggaactgtttagagcattcggtcgccacctggaacgtctgggcggcagttactactcagctgaggatgttaatatcacaactggtgacgttatggttatgcacaaagaaaccaactatgtactggggctggaaggtaaatctggcaacccttctccgttcaccgcgctgggtactttcctcggcattaaggctgcgtaccaacataaatttggtcaccaggatctgaccggcgtaaaagttgcagtgcaggggctcggtgctgtagcctatggtctgtgcaagcatttacacgaagctggagccaaactgttcgtgactgacataaatcaagccagcatcgatcgtgtcgtaacggacttcggcgctgttgcggttgacattgacgaaatctacgatcttgacgttgacgtctacgcaccgtgtgcattgggcgcaaccgtaaacgatgagactattccgcgcatcaaggctacaatcatcgcgggttgcgctaacaaccagctggctgagccgcgccacggtgacgtgctacgtgaaaaaggcgtactgtatgcgccggattacgtaattaacgctggtggcatcattaatgtctattacgaaactaaaccagaaggatacaacgaagcgctggcaaccaaacatgttgaaggcatcttcgataccctggctgaaatttttaagcgctccgatgaagagcagaaatctacgcacgttatcgcagatgagcttgctcaggagatcatagaaaacggtctg

SEQ ID NO: 165 - DNA, 1098 bp, Artificial Sequence
  Synthetic polynucleotide
atgacactggagatctttgaataccttgaaaagtatgactacgagcaagtagtcttctgccaggataaagaaagtggcttgaaagcaattatagccatccacgacactacgctgggtcctgctttagggggcactcgcatgtggacctatgatagcgaagaagctgcgatcgaagatgctctacgtctggcgaaaggtatgacctacaaaaatgcagctgccggtctcaacctgggcggtgcgaagactgttattatcggcgacccccgaaaagacaaatccgaggcaatgttccgtgcgctgggacgctacattcagggtctgaacggcagatacatcaccgctgaagatgtgggtacaaccgttgatgacatggacattatccatgaagaaactgacttcgtgaccgggatctcaccaagctttggctcttctggtaacccgtccccggttacggcatatggcgtataccgcggcatgaaagctgctgcgaaagaggccttcggtactgataacctggaagggaaggtaattgcggttcagggtgtcggtaatgtggcttatcacctctgtaaacatctgcacgctgaaggcgctaagctgattgttaccgatatcaacaaagaggcagtccaaagggccgttgaggaatttggtgcgtcggcagtagaaccgaatgaaatctacggcgttgaatgcgacatttacgccccgtgtgcgctgggtgccacggtcaacgatgaaactatccctcagctgaaagctaaggttatcgctggcagcgccaacaaccagctgaaagaagaccgtcatggagatatcatacacgagatgggtatcgtgtatgcgccggattacgtgatcaacgcagggggcgttattaattgcgcggacgaattatacggctataaccgtgaacgcgctttgaaacgggttgaatctatttacgatactatcgcaaaagtgatcgaaatcagcaaacgtgatggtattgctacctacgtagcagctgaccgcttggctgaagagcggatcgcatctttaaagaactcccgtagcacctatctgcgcaacggccacgatatcatatcgcgacgt

SEQ ID NO: 166 - DNA, 1098 bp, Artificial Sequence
  Synthetic polynucleotide
atgacactggagatctttgaataccttgaaaagtatgactacgagcaagtagtcttctgccaggataaagaaagtggcttgaaagcaattatagccatccacgacactacgctgggtcctgctttagggggcactcgcatgtggacctatgatagcgaagaagctgcgatcgaagatgctctacgtctggcgaaaggtatgacctacaaaaatgcagctgccggtctcaacctgggcggtgcgaagactgttattatcggcgacccccgaaaagacaaatccgaggcaatgttccgtgcgctgggacgctacattcagggtctgaacggcagatacatcaccgctgaagatgtgggtacaaccgttgatgacatggacattatccatgaagaaactgacttcgtgaccgggatctcaccaagctttggctcttctggtaacccgtccccggttacggcatatggcgtataccgcggcatgaaagctgctgcgaaagaggccttcggtactgataacctggaagggaaggtaattgcggttcagggtgtcggtaatgtggcttatcacctctgtaaacatctgcacgctgaaggcgctaagctgattgttaccgatatcaacaaagaggcagtccaaagggccgttgaggaatttggtgcgtcggcagtagaaccgaatgaaatctacggcgttgaatgcgacatttacgccccgtgtgcgctgggtgccacggtcaacgatgaaactatccctcagctgaaagctaaggttatcgctggcagcgccaacaaccagctgaaagaagaccgtcatggagatatcatacacgagatgggtatcgtgtatgcgccggattacgtgatcaacgcagggggcgttattaatgtggaggacgaattatacggctataaccgtgaacgcgctttgaaacgggttgaatctatttacgatactatcgcaaaagtaatcgaaatcagcaaacgtgatggtattgctacctacgtcgcggctgaccgcttggctgaagagcggatcgcatctttaaagaactcccgtagcacctatctgcgcaacggccacgatatcatatcgcgacgt

SEQ ID NO: 167 - DNA, 1044 bp, Artificial Sequence
  Synthetic polynucleotide
atgtcgctgttcgagcataaagaatttgatcagcacgaacaagtggtcttctgtcacgacaaggccacgggtctcaaagcaatcattgctatacatgatacaactatggggccggcgttaggcggtacccgcttgtggaactatgcatctagcagtgaagctcttactgacgttctgcgtctgtcccggggcatgacctacaaatctgctatctccggtctgcctctgggcggcggtaaagcggtaatcattggtgacgctaaacagatcaagagcgcggagctgttccgtgcctacgggcgctttgttaattctctgagcggcagatatatcaccgcagaagatgtaaacattcgtacctcagatatcgctatcgttgctgaagaaactaacttcgtggcgggaactgagggtaaagctggagacccatccccgcacactgctctgggcacctacctgggtctaaagattgcagcgaaacaccgtttaggctctgaagacctgagcggcgtgaaaatcgcagtacagggtcttggggctgttggttacgcttttgcagaatatctcgccaaggatggtgccgaactcttcgttactgacattaatgaggaagccgttaacaaagccgtaaacgaactgggcgctacggcggttggcctggacgatatctacggtttagatgtcgacatttatgcaccgtgcgctctgggcgctaccataaacgatgacacgctacaacagctgaaagcgaaagtgatcgctggtagcgctaacaatcagctggcaacccccaaacatgatcagctggtaaaagaccaaggaatcctctacgcaccggattacgttatcaacgccggcggcgtgatacacatctgctctgaggctgcgaacttcaccgttgaggaaactgaaaaacgtgtgcgcggtatctacgatactctggataacgtttttactcgcgccgcggaacagaataggccgacaggtgaaattgctgacgcaatggcgcgtgaaatcattgctaacgaaaagaagaaaaaagct

SEQ ID NO: 168 - DNA, 1098 bp, Artificial Sequence
  Synthetic polynucleotide
atgacactggagatctttgaataccttgaaaagtatgactacgagcaagtagtcttctgccaggataaagaaagtggcttgaaagcaattatagccatccacgacactacgctgggtcctgctttagggatcactcgcatgtggacctatgatagcgaagaagctgcgatcgaagatgctctacgtctggcgaaaggtatgacctacaaaaatgcagctgccggcctcaacctgggtggcgcgaagactgttattatcggtgacccccgaaaagacaaatccgaggcaatgttccgtgcgctgggacgctacattcagggcctgaacggtagatacatcaccgctgaagatgtgggtacaaccgttgatgacatggacattatccatgaagaaactgacttcgtgaccgggatctcaccaagctttggctcttctggtaacccgtccccggttacggcatatggcgtataccgcggcatgaaagctgctgcgaaagaggccttcggtactgataacctggaaggaaaggtaattgcggttcagggtgtcggtaatgtggcttatcacctctgtaaacatctgcacgctgaaggcgctaagctgattgttaccgatatcaacaaagaggcagtccaaagggccgttgaggaatttggcgcgtcggcagtagaaccgaatgaaatctacggtgttgaatgcgacatttacgccccgtgtgcgctgggcgccacggtcaacgatgaaactatccctcagctgaaagctaaggttatcgctggaagcgccaacaaccagctgaaagaagaccgtcatggggatataatccacgagatgggtatcgtgtatgcgccggattacgtgatcaacgcagggggtgttattaatgtggcggacgaattatacggctataaccgtgaacgcgctttgaaacgggttgaatctatttacgatactatcgcaaaagtaatcgaaattagcaaacgtgatggtatcgctacctacgtcgcagctgaccgcttggctgaagagcggatagcatctttaaagaactcccgtagcacctatctgcgcaacggccacgatatcatctcgcgacgt

SEQ ID NO: 169 - DNA, 1092 bp, Artificial Sequence
  Synthetic polynucleotide
atggagatcttcaagtatatggaaacctacgactacgaacaactggtcttttgtcaggataaaacttctggccttaaagcaattatcgcgatacatgacacgactctggggccagctttgggtggcacacgtatgtggaattacgctaccgaagaagaggccattgaagatgctttacgcctagcgaaaggtatgacttataaaaacgcagctgccggtctgaacctgggcggcggtaagaccgtaatcatcggagatcctctcaaagacaaaaacgaagagatgttccgtgcattcggtaggtttatccagggcctgaacgggcgctacatcaccgcggaagacgttggtactacggtggctgatatggacctgattcacgaagaaaccaattacgttaccggcatatccgaggctttcggttcgtcaggcaacccctctccggtgactgcgtatggtgtatacgttggcatgaaagccgctgctaaggaagcatttggcagcgacagcctggccggtaaaaccgtagctgtgcagggggttggtaacgttgcatatactctctgcgagtacctgcacaatgaaggcgcgaaactgattattgcagatatcaaccaagcgtccgtagatcgtgcggtcaacgcgttcggtgctgtgcaggttggcgtggatgaaatctacagtcaggaagcagacatctttgcaccgtgcgctctgggtgccatcatcaacgattctactattccgcagctgaaagctaaggtcattgccggtagcgcgaacaaccaattaaaagataccaagcatggtgaccttatccacgaaatgggcatcgcttatgctccggactatgtcatcaacagcggcggggttattaatgttgcggacgagctgtacggatacaaccacgatcgtgcgatgaatcgggtggctggtatctatgacaaaattgaacgcatcttcgaaatctctaaacgtgatggcattcctacctacgttgccgcagatcgtctggctgaagaacgcatcgcacgtgtttctaagtcccgctctcagttcttgcagaacggtaaacatattatcacgggcaga

SEQ ID NO: 170 - DNA, 1098 bp, Artificial Sequence
  Synthetic polynucleotide
atgacactggagatctttgaataccttgaaaagtatgactacgagcaagtagtcttctgccaggataaagaaagtggcttgaaagcaattatagccatccacgacactacgctgggtcctgctttagggggcactcgcatgtggacctatgatagcgaagaagctgcgatcgaagatgctctacgtctggcgaaaggttccacctacaaaaatgcagctgccggtctcaacctgggcggtgcgaagactgttattatcggcgacccccgaaaagacaaatctgaggcaatgttccgtgcgctgggacgctacattcagggtctgaacggcagatacatcaccgctgaagatgtgggtacaaccgttgatgacatggacattatccatgaagaaactgacttcgtgaccgggatctcaccaagctttggctcttccggtaacccgtctccggttacggcatatggcgtataccgcggcatgaaagctgctgcgaaagaggccttcggtactgataacctggaagggaaggtaattgcggttcagggtgtcggtaatgtggcttatcacctctgtaaacatctgcacgctgaaggcgctaagctgattgttaccgatatcaacaaagaggcagtccaaagggccgttgaggaatttggtgcgagcgcagtagaaccgaatgaaatctacggcgttgaatgcgacatttacgccccgtgtgcgctgggtgccacggtcaacgatgaaactatccctcagctgaaagctaaggttatcgctggctcggccaacaaccagctgaaagaagaccgtcatggagatatcatacacgagatgggtatcgtgtatgcgccggattacgtgatcaacgcagggggcgttattaatgtggcggacgaattatacggctataaccgtgaacgcgctttgaaacgggttgaatccatttacgatactatcgcaaaagtaatcgaaatcagcaaacgtgatggtattgctacctacgtcgcagctgaccgcttggctgaagagcggatcgcatctttaaagaactctcgtagcacctatctgcgcaacggccacgatatcatatcgcgacgt

SEQ ID NO: 171 - DNA, 1083 bp, Artificial Sequence
  Synthetic polynucleotide
atgcacccgttccagactaatgagggcgatatcatgagcgtttttaacctctccgacttcgcggatcatgaacaagtagtcttttgctctgacgaaaaaagtggtttaaaggcaattatcgctgttcacaactctaacctggggccagctctgggcggttgtcgtatgtggccttatgcctcagaagaggaagcaattcgcgatgtgcttcgtttgtcccgaggtatgacgtacaaatcggcgatggctaacctgaaactgggcggtggcaaaagcgtgatcataggaaatccgcgcacagacaagaccccggaactgctgaaagcgttcgcacaggctgtcgaacgtgttaacggtaggtacatcgctgccgaggactctggcactggcgtagatgacatgaaattcatgtcccagtttaccgaccatgttgccggtattattgataagcccagcgaaaacggcgtgcgcagtggcgatccgtctcctgcgactgcttatggtaccttcgtaggtatcaaagcggcagttaaagagcgtctgggtcgtgattcactggctggccttaaaatcgccgtccagggtctaggaaacgttgggtttgatctggcacgtcaattaaaggaagcaggcgctcagctgtgggtgaccgacatccaccgggaaccgctgattcgtgccggcaaagaattggacgcaacggttgtagctccggatgagatcttcggtctggatgttgacgtcttcgcgccatgcgctatgggcgcgattatcaatgaccagactctgccccaactgaaagctaagatcgttgcgggtgcagcaaacaaccagctcgctgaaccgcgccacggtctggcgctgatgaataaaggcatcctgtacgcgccggactacgttatcaacgctggcggcattatagatgtttactatgaacgtaccggtaactttgatcgtgccgctctgaaatcgcatatcgaaagcatctatgataacctaatggaaatcttcgctcgggctcgcaaagaggagcgcccgactggtgaagtggctgacgcgattgctgaagaacgtttcaaacgt

SEQ ID NO: 172 - DNA, 1098 bp, Artificial Sequence
  Synthetic polynucleotide
atgacactggagatctttgaataccttgaaaagtatgactacgagcaagtagtcttctgccaggataaagaaagtggcttgaaagcaattatagccatccacgacactacgctgggtcctgctttagggggcactcgcatgtggacctatgatagcgaagaagctgcgatcgaagatgctctacgtctggcgaaaggtatgacctacaaaaatgcagctgccggtctcaacctgggcggtgcgaagactgttattatcggcgacccccgaaaagacaaatccgaggcaatgttccgtgcgctgggacgctacattcagggtctgaacggcagatacatcaccaccgaagatgtgggtacgactgttgatgacatggacattatccatgaagaaaccgacttcgtgactgggatctcaccaagctttggctcttctggtaacccgtccccggttacggcttatggcgtataccgcggcatgaaagctgctgcaaaagaggccttcggtaccgataacctggaagggaaggtaattgcggttcagggtgtcggtaatgtggcttatcacctctgtaaacatctgcacgctgaaggcgctaagctgattgttactgatatcaacaaagaggcggtccaaagggcagttgaggaatttggtgcgtcggcagtagaaccgaatgaaatctacggcgttgaatgcgacatttacgccccgtgtgcgctgggtgccacagtcaacgatgaaactatccctcagctgaaagccaaggttatcgctggcagcgcaaacaaccagctgaaagaagaccgtcatggagatatcatacacgagatgggtatcgtgtatgcgccggattacgtgatcaacgctgggggcgttattaatgtggcggacgaattatacggctataaccgtgaacgcgctttgaaacgggttgaatctatttacgatactatcgcaaaagtaatcgaaatcagcaaacgtgatggtattgctacctacgtcgcagctgaccgcttggctgaagagcggatcgcatctttaaagaactcccgtagcacctatctgcgcaacggccacgatatcatatcgcgacgt

SEQ ID NO: 173 - DNA, 1080 bp, Artificial Sequence
  Synthetic polynucleotide
atgggcgtgttcacatctactgacgatcctgggtcaacgggtcacgaacaggtcgtattttgccaagacaaacagaccggtctcaaggccataatcggcatctattctaccgcgcttggtccagctctgggcggtactcgcttctacccctacgattccgaggaagctgcattggctgatgttctggacctgtcgcgtggcatggcatataaaaatgccctggcgggcttagacctgggtggcggtaaagctgttatttggggcgatccggaaaagatcaaaagcgaggcgctgctgcgtgcatacggtagatttgtggaaagcctgggaggccgctactatactgcttgtgacgttggtacctacgtaccggatatggacgtcattgcgcgagaaaccaggtatgttactgggcgctccgttgaacatggtggtgccggcgatagcagtatcctgacggcttggggagtattccagggtatgcgtgccgcagctgagcacgtgtggggcgaaccgaccctacgtgggcgtcgcgttggcgttactggtctcggcaaagtcggtaaatacctggtaggtcatctgttggacgatggtgcagaagtggttgcttctgacgtgaaccctcgggctttggagtgggctcgtacgaaccacccgcaggttactctggtagatgatgccgcgctgctggttagttccgatattgacgtctacgcaccgtgcgctctcggcggtgcgcttaacgacgaaaccgtgccagcattacgcgcgaaagtcgttgctggcgctgccaacaatcaactggctcacagcggtatcgaaaaactgctggccgaccgtggcatcctgtacgcgccggactatgttgtaaacgcgggaggcgtaatccaggtggctgatgagatcgaaggtttcaacttcgaacgtgctaagctgcgcgcaacccgtatctacgatactactcgtgaaattctggaactggccgatgcggaaggtgttccgccggcggtagctgctgaccgcttggctgagcgtcgtatggcagaagtaggtcgtctgaggaccatccatctgcct

SEQ ID NO: 174 - DNA, 1092 bp, Artificial Sequence
  Synthetic polynucleotide
atgaagatcttcgagactttggaacagtatgactacgaacaactggtcctatgtcaggataaagaaagtggtctgaaagccattatcgctatacacgatacgaccttagggccggcgcttggcggtacccgcatgtggacttacgcaactgaggaagacgctattgttgacgcactccgtctggctaaaggcatgacctataaaaatgcggctgccggtctgaacctgggcggtggcaagacagtgatcatcggagatcctaaaaaagacaaaaacgaagcgatgtttcgggccttcggtagatacgtacagtcactgaacggccgttacatcactgctgaagatgttggtaccaccgtagaggacatggaactgattcatactgaaactgacttcgttaccggcatttctgctgaaagcggtagctccggcaacccgtccccagtgaccgcatatggtgtatacaagggcatcaaagcgtcggcaaaagaggcgtttggggatgactctctggaaggcaaaacgatcgctgttcaaggtatcggcaatgtcgcttatgcactgtgcgagcacttacatgcagaaggtgctaagctgatcgttactgatattaacaaagaagctgtgcagaaggcggtagaggcttttggcgcaacagccgttgatccggacgatatctacggtgttgagtgcgacattttcgctccctgtgcccttggagctgtgatcaacgatgacactctgcgtgtgctgaaagcaaaagttgtagcaggtgcggcaaataaccagctgaaggaagaacaccatggtcagattctgttcgaacgcggaatcgtgtacgcgccggattacgttataaacagcggcggtgtaatcaacgtcgaagatgagcttcacggctacaatcgtgaacgtgcgttgcgtaaagtcgaaaccatctatgatagtctgcaacgcgtttttgaaattgccaaacgcgacgagattccaacttctatcgcggctgatcgtatggcagaagaaaggatcgaaacaatgcgtaaatctcgtagccagttcctgcgcaacggtcaccacactctgtcccgccga

SEQ ID NO: 175 - DNA, 1098 bp, Artificial Sequence
  Synthetic polynucleotide
atgacactggagatctttgaataccttgaaaagtatgactacgagcaagtagtcttctgccaggataaagaaagtggcttgaaagcaattatagccatccacgacactacgctgggtcctgctttagggtacactcgcatgtggacctatgatagcgaagaagctgcgatcgaagatgctctacgtctggcgaaaggtatgacctacaaaaatgcagctgccggcctcaacctgggtggcgcgaagactgttattatcggtgacccccgaaaagacaaatccgaggcaatgttccgtgcgctgggacgctacattcagggcctgaacggtagatatatcaccgctgaagatgtgggtacaaccgttgatgacatggacattatccatgaagaaactgacttcgtgaccgggatctcaccaagctttggctcttctggtaacccgtccccggttacggcatatggcgtataccgcggcatgaaagctgctgcgaaagaggccttcggtactgataacctggaaggaaaggtaattgcggttcagggtgtcggtaatgtggcttaccacctctgtaaacatctgcacgctgaaggcgctaagctgattgttaccgatatcaacaaagaggcagtccaaagggccgttgaggaatttggcgcgtcggcagtagaaccgaatgaaatctacggtgttgaatgcgacatttacgccccgtgtgcgctgggcgccacggtcaacgatgaaactatccctcagctgaaagctaaggttatcgctggaagcgccaacaaccagctgaaagaagaccgtcatggggatatcatacacgagatgggtatcgtgtatgcgccggattacgtgatcaacgcagggggtgttattaatgtggcggacgaattatacggctataaccgtgaacgcgctttgaaacgggttgaatctatttacgatactatcgcaaaagtaatcgaaatcagcaaacgtgatggtattgctacctatgtcgcagctgaccgcttggctgaagagcggatcgcatctttaaagaactcccgtagcacctatctgcgcaacggccacgatatcatatcgcgacgt

SEQ ID NO: 176 - DNA, 1098 bp, Artificial Sequence
  Synthetic polynucleotide
atgacactggagatctttgaataccttgaaaagtatgactacgagcaagtagtcttctgccaggataaagaaagtggcttgaaagcaattatagccatccacgacactacgctgggtcctgctttagggggcactcgcatgtggacctatgatagcgaagaagctgcgatcgaagatgctctacgtctggcgaaaggtatgacctacaaaaatgcagctgccggtctcaacctgggcggtgcgaagactgttattatcggcgacccccgaaaagacaaatccgaggcaatgttccgtgcgctgggacgctacattcagggtctgaacggcagatacatcaccgctgaagatgtgggtacaaccgttgatgacatggacattatccatgaagaaactgacttcgtgaccgggatctcaccaagctttggctcttctggtaacccgtccccggttacggcatatggcgtataccgcggcatgaaagctgctgcgaaagaggccttcggtactgataacctggaagggaaggtaattgcggttcagggtgtcggtaatgtggcttatcacctctgtaaacatctgcacgctgaaggcgctaagctgattgttaccgatatcaacaaagaggcagtccaaagggccgttgaggaatttggtgcgtcggcagtagaaccgaatgaaatctacggcgttgaatgcgacatttacgccccgtgtgcgctgggtgccacggtcaacgatgaaactatccctcagctgaaagctaaggttatcgctggcagcgccaacaaccagctgaaagaagaccgtcatggagatatcatacacgagatgggtatcgtgtatgcgccggattacgtgatcaacgcagggggcgttattaatgtggcggacgaacactacggctataaccgtgaacgcgctttaaaacgggttgaatctatttacgatactatcgcaaaagtaatcgaaatcagcaaacgtgatggtattgctacctacgtcgcagctgaccgcttggctgaagagcggatcgcatctttaaagaactcccgtagcacctatctgcgcaacggccatgatatcatatcgcgacgt

SEQ ID NO: 177 - DNA, 1101 bp, Artificial Sequence
  Synthetic polynucleotide
atgatcttcgagacaattgctacgtcaggtcacgaagaagttgtgttttgccataacaaggacgccgggttgaaagcgatcatcgcagtccacaatactgtactcggtccggctctgggcggcttacgcatgtggccctacaaaaccgaacaggaggcactgaacgatgtacttcgtctgtcccgtggcatgacttataaaaacgctgttgcgggtctaaatctgggtggcggaaaagctgtgattatcggtgatccgtctaaagacaagagtgaagcgctgttcagagcctttggccggttcgttaacagcctgaacggacgctacattaccgcggaagacgtcggcattgatgttaacgacatggaatgggtgttccgtgaaactgagtttgttaccggtgtacatcaagttcacggtgggtcgggtgatccttctccatttaccgcattcggcactctgcaaggcctgatggctaccctgtctgcacgtttcggtaacgaagacgtgggcaaatatagctacgctgttcagggtgtgggtcacgttggcatggaatttgtcaagctgctgcgcgaacagggcgcaaaagtgttcgttaccgatatcaataaagaggccgtacagcgttgtgtcgatgagctaggttgcgaagcagtaggcctggacgatatctacgacgttgatgctgacgtgtatagcccgtgtgctctgggtggcactgtgaacgaaaaaactttgccgcgtctgaaaatgaagataatctgcggtgcggcgaacaaccagttagccaatgatgctatcggtgacgaagtagagaaacgcggaattttgtacgcgccggattacgcagtaaacgctgggggcgttatgaacgtgtcactggaaatcgacgggtataaccgtgaacgagctatgcgcatgatgcgtacgatttactataatctttcccgtatcttccagatcgcgaaacgcgatggtattcctacctacaaagcagctgataggatggctgaagaaaggatctccgctattggcaaaatcaaactgccgactatgggcaaccatggtccccgcttcctggggcgtatgcgtggtcag

SEQ ID NO: 178 - DNA, 1104 bp, Artificial Sequence
  Synthetic polynucleotide
atgacagcggacctcttgactacgtcagaactgcataaggttgatccagtatttgggcaggtgtccttcgatggccacgagcaagtcgttttctgctatgacaaagataccggtctgaaagctattatcggcatccacaacactgtgttaggtccggccctgggtggcacccgtatgtggaaatacaccaatgaatgggaagctctgaacgacgttcttcgcctgtctcgaggcatgactttcaaaaacagtattagcggtctgaatctgggcggtggaaaggcagtaatcataggcgacgcaaaaaccgagaaaactccggaactgatgacgaggtttggtcagttcgttgattctctgagcggtaaatacatcaccgctgaagacgtaggcatggagaccaaggatatggatatcgttaacaacgtgactaaacatgttgctggcatttccgtggaacgtggtgggtcggggaacccttcccccgttacagcgtatggtgtctttatgggaatgaaagcagcggccaagtacaaattcggctctgacaatcttgaaggtaaatcggttctggtccagggcatcggtcacgtaggtgaggtcttagtacagcacctcactgaatcaggcgctattgtgagtatcacggacattaacgaagaccgcgttcaccaagttggcagcaaatacggtgcaaagatctttaccggcgctgatctgtatgccgcggacgtcgatatctacgctccgtgtgcactgggtgccaccattaacgatgacaccatcgataaaattcaggctaaagtgatcgctggggccgcgaacaatcagctggctaacgaacttaagcatggtaaaatcctgaaagaaaagggcattctgtatgcgccggacttcttgatcaacgcaggcggcgttatcaacgtttacagcgaactagcaaatctgactaaagctcaggtcatggaaaaaactgagaacatctacaacactgctctggaaattttcgattttgcggataaaaacaacgtgacgacccatgctgcggcactctctatagcccaaaaacgtatcgaggatcgtaagaacgaactgcaaaataaa

SEQ ID NO: 179 - DNA, 1047 bp, Artificial Sequence
  Synthetic polynucleotide
atgaagctgttctcgcatcacgagtttgataaccacgaacaagtggtcttctgtcacgacaaaaccagcggtctcaaagccatcattgctatacataatacgcaccgtgggccggcgttaggcggttgccgcatgtatccctacgcatctgaagctgaagcattgaacgacgttcttcgtctgtccagaggcatgacttacaaatcagctatcgcgaacctgccactgggtggcggcaaaagcgtaatcattggtgatcctcattctgacaagaccccgcagctgatccgcgccatgggagttgcggtcgagcgtctgggtggccggtatatcgtggctgaagatagtggtacttctgtaccggatatgctgctgatgtccgaacagacacgtcacattagcggcatcgcggaaaaatttgacgcagacggtaaacgtcgttctggcgacccgagcccgattaccgctcgcggggttttcgttggtattcaggctgccgtccgctaccgcctgggccgtgatgacctacagggtgtgcgtgtagctatccaaggtctgggcaacgttggttaccacctggcatcccagctgcgggctgcgggcgctcgtctttgggtttctgatatcaaccaggctgcggtccaaagggcagttgatgagctgggagcagtggctgttgccaatggcgaaatttatgaccaggctgtagatcttttcgcgccttgcgccatgggtgccatcctcaacgacactaccatcccacgcctgcaagctcgcatcgtagcaggtgctgcaaataaccagctggccgacaaacgccacggtcaggcattgatggaacgtggaattttgtacgcgccggattatgttattaacgcgggcggcgttatcgacgtgtgctacgaacgctccgatatggaccctcagcaggttatggaacaggttgatggtatcggtgatactctgaccgagatcttttctcgtgccgaacagcagcataaaccgactgatgttctggcggaccagctagctgaggaacgtttcagc

SEQ ID NO: 180 - DNA, 1098 bp, Artificial Sequence
  Synthetic polynucleotide
atgacactggagatctttgaataccttgaaaagtatgactacgagcaagtagtcttctgccaggataaagaaagtggcttgaaagcaattatagccatccacgacactacgctgggtcctgctttagggggcactcgcatgtggacctatgatagcgaagaagctgcgatcgaagatgctctacgtctggcgaaaggtatgacctacaaaaatgcagctgccggtctcaaccatggcggtgcgaagactgttattatcggcgacccccgaaaagacaaatccgaggcaatgttccgtgcgctgggacgctacattcagggtctgaacggcagatacatcaccgctgaagatgtgggtacaaccgttgatgacatggacattatccacgaagaaactgacttcgtgaccgggatctcaccaagctttggctcttctggtaacccgtccccggttacggcatatggcgtataccgcggcatgaaagctgctgcgaaagaggccttcggtactgataacctggaagggaaggtaattgcggttcagggtgtcggtaatgtggcttatcatctctgtaaacacctgcatgctgaaggcgctaagctgattgttaccgatatcaacaaagaggcagtccaaagggccgttgaggaatttggtgcgtcggcagtagaaccgaatgaaatctacggcgttgaatgcgacatttacgccccgtgtgcgctgggtgccacggtcaacgatgaaactatccctcagctgaaagctaaggttatcgctggcagcgccaacaaccagctgaaagaagaccgtcacggagatatcatacacgagatgggtatcgtgtatgcgccggattacgtgatcaacgcagggggcgttattaatgtggcggacgaattatacggctataaccgtgaacgcgctttgaaacgggttgaatctatttacgatactatcgcaaaagtaatcgaaatcagcaaacgtgatggtattgctacctacgtcgcagctgaccgcttggctgaagagcggatcgcatctttaaagaactcccgtagcacctatctgcgcaacggccatgatatcatatcgcgacgt

SEQ ID NO: 181 - DNA, 1032 bp, Artificial Sequence
  Synthetic polynucleotide
atgtcgatcttcgagttgcctgactttgatggccatgaacaagtggtcttcgccagcgacagtcagtccggtctgaaggcaattatcgctatacacaatacgcaccgtgggccggcgatgggtggttgccgcatgtgggcttatccggattcaacagttgcagctactgacgcgttacgtctcgccagaggcatgacttacaaaaacgctatggccggccttccaattggcggtggcaaagcggtaatcatcggtgatgctcgtacctccaaaagcccggaactgttccgcgcactggggcgtgcgattgaccagctgggaggtcggtacatcaccgctgaagatgttggtacttctccggcagatatgacctttgtacgtgaacagacccgctatgtggcgggcctgagcggcgacctaggaggcactggtgacccttctcccgctacggctctgggtgttttcgtaggcatcgaggccgcagttcgtcaccgcctgggtgtcgattctgtgaacggtctgacagttgcagttcagggcctgggtcatgttggctacgatctggctcgtcgcctgcacgaagctggtgcacgattgatcgtagctgacattgaccgtgctaacggcgagcgcgctgcggccgaatttggtgccagcgtggtatccccggatgaaatcgtcgacgcacaagcggacgtgttcgcgccgtgtgccctgggcgcagttctgaatcgtcagactttgccacgtctgaaatgctctgtggttgcaggtgcggccaacaaccagttagctaccgatgacatcggcgagatgctgcgagatgcgggcgttctctacgctccggattatgtaattaacgcgggtgggatcattaaggtttgcgcggaataccttcaggaaccggtcgactccgtggaagatcgcgtgcgtgctatctctgggactcttgatgaagttttccaaatggctgagcgtgacggtattgctacctcacgcgccgcagataccctggctcgtactcgtttcgcg

SEQ ID NO: 182 - DNA, 1098 bp, Artificial Sequence
  Synthetic polynucleotide
atgacactggagatctttgaataccttgaaaagtatgactacgagcaagtagtcttctgccaggataaagaaagtggcttgaaagcaattatagccatccacgacactacgctgggtcctgctttagggggcactcgcatgtggacctatgatagcgaagaagctgcgatcgaagatgctctacgtctggcgaaaggtatgacctacaaaaatgcagctgccggtctcaacctgggcggtgcgaagactgttattatcggcgacccccgaaaagacaaatccgaggcaatgttccgtgcgctgggacgctacattcagggtctgaacggcagatacatcaccgctgaagatgtgggtacaaccgttgatgacatggacattatccatgaagaaactgacttcgtgaccgggatctcaccaagctttggctcttctggtaacccgtccccggttacggcatatggcgtataccgcggcatgaaagctgctgcgaaagaggccttcggtactgataacctggaagggaaggtaattgcggttcagggtgtcggtaatgtggcttatcacctctgtaaacatctgcacgctgaaggcgctaagctgattgttaccgatatcaacaaagaggcagtccaaagggccgttgaggaatttggtgcgtcggcagtagaaccgaatgaaatctacggcgttgaatgcgacatttacgccccgtgtgcgctgggtgccacggtcaacgatgaaactatccctcagctgaaagctaaggttatcgctggcagcgccaacaaccagctgaaagaagaccgtcatggagatatcatacacgagatgggtatcgtgtatgcgccggattacgtgatcaacgcagggggcgttattaatctggcggacgaattatacggctataaccgtgaacgcgctttaaaacgggttgaatctatttacgatactatcgcaaaagtgatcgaaatcagcaaacgtgatggtattgctacctacgtagcagctgaccgcttggctgaagagcggatcgcatctttaaagaactcccgtagcacctatctgcgcaacggccacgatatcatatcgcgacgt

SEQ ID NO: 183 - DNA, 1032 bp, Artificial Sequence
  Synthetic polynucleotide
atggagatcagcaagaaagaaaactaccaaggctatgaatgggtggtcttcgcctcggacgataaaacgaattttaaagcaattatcgctgtacactctacagaattagggccggcgttgggtggttgccgcatgtggttctacaacaacgagaacgaagctcttactgacgttctccgtctggcagaaggcatgacttataaaaattccgctatgggtctgaacctgggcggcggtaaagcggttattatcggtgatcctcgtaccgacaagtcaccggaactgttcgcccggtttgcggaggcagtcaactctctgggaggcaaatactacaccgctgaagatgtaggtatctctccagctgatatgctggaggtttataaacataccccgtacgtggtaggcctgccggctaagtccggggaccccagtccgttcactgcttacggcgtttacgtgggtatgaaagcagcggtcgaagaagcctttggtgataccagcctggaaggcaagaaagttgcagtgcagggattggggcacgtaggtatgtatctgctggaacatctctataacgagggtgccaaactaatcgttactgacatttttaccgaacgcgttaaagaggctgtggaacgtttcggcgctctgccagttgaaccggagaagatctacgaagttgaagcggacattttcgcaccgtgtgctctgggcgccatcctgaatgaaaacacgattcctcgtcttaaagtaaaagtgatcgctggtgcggctaacaatcagctggcaaaactttctgatggcttcctgctgcgcgaccgtggcatagtttacgcgccagattttatcataaacggtggcggcgtgatcaacgtggcagaagaattaaacccggaaggttatgacaagaaccgagtctgggagaaagttgcgacaatttaccacaaagtgaaagaagttctgactctggctcgtgaacagaacatcagtcctcaagaagctgcaatcagatatgctaagaaacgtttgaacagg

SEQ ID NO: 184 - DNA, 1098 bp, Artificial Sequence
  Synthetic polynucleotide
atgacactggagatctttgaataccttgaaaagtatgactacgagcaagtagtcttctgccaggataaagaaagtggcttgaaagcaattatagccatccacgacactacgctgggtcctgctttagggggcactcgcatgtggacctatgatagcgaagaagctgcgatcgaagatgctctacgtctggcgaaaggtatgacctacaaaaatgcagctgccggtctcaacctgggcggtgcgaagactgttattatcggcgacccccgaaaagacaaatccgaggcaatgttccgtgcgctgggacgctacattcagggtctgaacggcagatacatcaccgctgaagatgtgggtacaaccgttgatgacatggacattatccatgaagaaactgacttcgtgaccgggatctcaccaagctttggctcttctggtaacccgtccccggttacggcatatggcgtataccgcggcatgaaagctgctgcgaaagaggccttcggtactgataacctggaagggaaggtaattgcggttcagggtgtcggtaatgtggcttatcacctctgtaaacatctgcacgctgaaggcgctaagctgattgttaccgatatcaacaaagaggcagtccaaagggccgttgaggaatttggtgcgtcggcagtagaaccgaatgaaatctacggcgttgaatgcgacatttacgccccgtgtgcgctgggtgccacggtcaacgatgaaactatccctcagctgaaagctaaggttatcgctggcagcgccaacaaccagctgaaagaagaccgtcatggagatatcatacacgagatgggtatcgtgtatgcgccggattacgtgatcaacgcagggggcgttattaatgtggcggacgaatattacggctacaaccgtgaacgcgctttaaaacgggttgaatctatttacgatactatcgcaaaagtaatcgaaatcagcaaacgtgatggtattgctacctatgtcgcagctgaccgcttggctgaagagcggatcgcatctttaaagaactcccgtagcacctatctgcgcaacggccacgatatcatatcgcgacgt

SEQ ID NO: 185 - DNA, 1098 bp, Artificial Sequence
  Synthetic polynucleotide
atgacactggagatctttgaataccttgaaaagtatgactacgagcaagtagtcttctgccaggataaagaaagtggcttgaaagcaattatagccatccacgacactacgctgggtcctgctttagggggcactcgcatgtggacctatgatagcgaagaagctgcgatcgaagatgctctacgtctggcgaaaggtatgacctacaaaaatgcagctgccggtctcaacctgggcggtgcgaagactgttattatcggcgacccccgaaaagacaaatccgaggcaatgttccgtgcgctgggacgctacattcagggtctgaacggcagatacatcaccgctaacgatgtgggtacaaccgttgatgacatggacattatccatgaagaaactgacttcgtgaccgggatctcaccaagctttggctcttctggtaatccgtccccggttacggcatatggcgtataccgcggcatgaaagctgctgcgaaagaagccttcggtactgataacctggaggggaaggtaattgcggttcagggtgtcggtaacgtggcttatcacctctgtaaacatctgcacgctgaaggcgctaagctgattgttaccgatatcaacaaagaagcagtccaaagggccgttgaggaatttggtgcgtcggcagtagagccgaatgaaatctacggcgttgaatgcgacatttacgccccgtgtgcgctgggtgccacggtcaacgatgaaactatccctcagctgaaagctaaggttatcgctggcagcgccaacaaccagctgaaagaagaccgtcatggagatatcatacacgaaatgggtatcgtgtatgcgccggattacgtgatcaacgcagggggcgttattaatgtggcggacgagttatacggctataaccgtgaacgcgctttgaaacgggttgaatctatttacgatactatcgcaaaagtaatcgaaatcagcaaacgtgatggtattgctacctacgtcgcagctgaccgcttggctgaagagcggatcgcatctttaaagaactcccgtagcacctatctgcgcaatggccacgatatcatatcgcgacgt

SEQ ID NO: 186 - DNA, 1113 bp, Artificial Sequence
  Synthetic polynucleotide
atgacagacgtgttcggtttgagccacaaagattccagtcctgtatctaccccaatgtcggggcaagcgggccatgagcaggtcgttttttgctcagatgaacgttctggcctgcgcgctattatcgcaatccacaatacggccctgggtccggctcttggtggcactaggttctatccctacgaaagcgaacaggcagctttagcggacgttctcaacctgtcccgtgccatggcttacaagaacgcactggcaggactggatctcggcggtggtaaagctgtgataatcggccatccggagaccgacaaaaacgaagcgatgctgcgcgcgtacggacgttttgtacagtccttaggcggtcgttatctgactgcttgtgatgttggtacttacagcgaagacatggacctgattgctagagagacctcttatgttactggtcgcaccctagcgcagggcggcgcaggcgactcgtctatcctgactgcattcggtgtcttccaagggatgcgtgctgccagcgaacacgttttcggtacgtcttcattgcgtggccgccgtgtaggtgtggaaggcgtcggtaaagttggacatcggctggttgatcacctggttgaagacggtgcggaagtcgtggtatgcgatgtatctgaacgagcagtggagctggttcgtcgccgtcacccgcaggtagaggtggttgctgatcagtccgcgctgaccgccgcggatattgatgtttacgctccgtgcgccctcggcggggctctggacgacggcaccgtcgctcgtctgcgcgctagcatcgtttgcggtggagcaaataaccagctagctcatccaggcgtagaaaagcagctggcggataggggtatcctgtatgcgccggactacgttgtgaactcaggcggtgttatccaagttgcagacgaaattcagggtttcgatatggatcgcgctcgtgctaaagccgagaaaatctacgctactaccctgaaaatttttactaccgcggctgaagatggcgtgccgcccgccgttgcggcagaccgtctggccgaacgccgtatgagtgaagttggaagaatccggggtatctggctgggccgt

SEQ ID NO: 187 - DNA, 1098 bp, Artificial Sequence
  Synthetic polynucleotide
atgacactggagatctttgaataccttgaaaagtatgactacgagcaagtagtcttctgccaggataaagaaagtggcttgaaagcaattatagccatccacgacactacgctgggtcctgctttagggggcactcgcatgtggacctatgatagcgaagaagctgcgatcgaagatgctctacgtctggcgaaaggtatgacctacaaaaatgcagctgccggtctcaacctgggcggtgcgaagactgttattatcggcgacccccgaaaagacaaatccgaggcaatgttccgtgcgctgggacgctacattcagggtctgaacggcagatacatcaccgctgaagatgtgggtacaaccgttgatgacatggacattatccatgaagaaactgacttcgtgaccgggatctcaccaagctttggctcttctggtaacccgtccccggttacggcatatggcgtataccgcggcatgaaagctgctgcgaaagaggccttcggtactgataacctggaagggaaggtaattgcggttcagggtgtcggtaatgtggcttatcacctctgtaaacatctgcacgctgaaggcgctaagctgattgttaccgatatcaacaaagaggcagtccaaagggccgttgaggaatttggtgcgtcggcagtagaaccgaatgaaatctacggcgttgaatgcgacatttacgccccgtgtgcgctgggtgccacggtcaacgatgaaactatccctcagctgaaagctaaggttatcgctggcagcgccaacaaccagctgaaagaagaccgtcatggagatatcatacacgagatgggtatcgtgtatgcgccggattacgtgatcaacgcagggggcgttattaatgtgaaagacgaattatacggctataaccgtgaacgcgctttgaagcgggttgaatctatttacgatactatcgcaaaagtaatcgaaatcagcaaacgtgatggtattgctacctacgtcgcggctgaccgcttggctgaagagcggatcgcatctttaaaaaactcccgtagcacctatctgcgcaacggccacgatatcatatcgcgacgt

SEQ ID NO: 188 - DNA, 1098 bp, Artificial Sequence
  Synthetic polynucleotide
atgacactggagatctttgaataccttgaaaagtatgactacgagcaagtagtcttctgccaggataaagaaagtggcttgaaagcaattatagccatccacgacactacgctgggtcctgctttagggggcactcgcatgtggacctatgatagcgaagaagctgcgatcgaagatgctctacgtctggcgaaaggtatgacctacaaaaatgcagctgccggtctcaactacggcggtgcgaagactgttattatcggcgacccccgaaaagacaaatccgaggcaatgttccgtgcgctgggacgctacattcagggtctgaacggcagatatatcaccgctgaagatgtgggtacaaccgttgatgacatggacattatccatgaagaaactgacttcgtgaccgggatctcaccaagctttggctcttctggtaacccgtccccggttacggcatatggcgtataccgcggcatgaaagctgctgcgaaagaggccttcggtactgataacctggaagggaaggtaattgcggttcagggtgtcggtaatgtggcttaccacctctgtaaacatctgcacgctgaaggcgctaagctgattgttaccgatatcaacaaagaggcagtccaaagggccgttgaggaatttggtgcgtcggcagtagaaccgaatgaaatctacggcgttgaatgcgacatttacgccccgtgtgcgctgggtgccacggtcaacgatgaaactatccctcagctgaaagctaaggttatcgctggcagcgccaacaaccagctgaaagaagaccgtcatggagatatcatacacgagatgggtatcgtgtatgcgccggattacgtgatcaacgcagggggcgttattaatgtggcggacgaattatacggctataaccgtgaacgcgctttgaaacgggttgaatctatttacgatactatcgcaaaagtaatcgaaatcagcaaacgtgatggtattgctacctatgtcgcagctgaccgcttggctgaagagcggatcgcatctttaaagaactcccgtagcacctatctgcgcaacggccacgatatcatatcgcgacgt

SEQ ID NO: 189 - DNA, 1098 bp, Artificial Sequence
  Synthetic polynucleotide
atggagctgttcaagtatatggaaacctacgactacgaacaagtggtcgtatgtcaggataaacagagtggtctcaaagccatcattgctatacacgatacgactttagggccggcgttgggcggtacccgcatgtggacttatgaatctgaggaagctgcatttgaagacgcacttcgtctggctaaaggcatgacatacaaaaatgcggctgccggtctgaacctgggcggtggcaagactgttatcatcggagaccctcgtaaagataaaaacgaagcgatgttcagagccttcggtcggtacattcagggcctgaacggccgttacatcaccgctgaggacgttggtacctcagtagaagatatggacatcgtgtatcaagaaactgactacgttaccggcatttcccccgcatttggtagctcgggtaacccgtccccggtaactgcatatggtgtcttcgttggcatgaaagctgcggcgaaagaagcgtttgggactgattctctggaaggcaaaaaggtggctgttcagggtgtgggcaatgttgctttcacactgtgcaagtacttacatgaggaaggtgctaaactgatcgtcactgacattaacaaagatgctgttaagcgcgcagtagaggaatttgatgcagaagccgttgacccagaggatatctactctgtccagtgcgacatctacagtccgtgtgctctcggagctacgattaacgataacaccatccctaaactgaaagcaaaagttatcgccggtgcggcaaataaccagctgaaggaaacccgccacggcgatattctgcaagagatcgggatagtatacgccccggactatgtgatcaacagcggtggcgtgattaacgtagctgacgaattgctggggtataatcgtgatagggctttcaaaaaagttgaaactatctatgacagcatctctaccattttcaaaatcgcaaagcgtgatagcattccgacttacgcggcggccgatcgtatggcagaagaaaggatcgaaaacatgcgtcgctctcgtaaacagttcctgcgctccgatgtcaacattatctcgcgtggccgccgc

SEQ ID NO: 190 - DNA, 1098 bp, Artificial Sequence
  Synthetic polynucleotide
atgacactggagatctttgaataccttgaaaagtatgactacgagcaagtagtcttctgccaggataaagaaagtggcttgaaagcaattatagccatccacgacactacgctgggtcctgctttagggggcactcgcatgtggacctatgatagcgaagaagctgcgatcgaagatgctctacgtctggcgaaaggtatgacctacaaacatgcagctgccggtctcaacctgggcggtgcgaagactgttattatcggcgacccccgaaaagacaaatccgaggcaatgttccgtgcgctgggacgctacattcagggtctgaatggcagatacatcaccgctgaagatgtgggtacaaccgttgatgacatggacattatccacgaagaaactgacttcgtgaccgggatctcaccaagctttggctcttctggtaacccgtccccggttacggcatatggcgtataccgcggcatgaaagctgctgcgaaagaggccttcggtactgataacctggaagggaaggtaattgcggttcagggtgtcggtaatgtggcttatcatctctgtaaacacctgcatgctgaaggcgctaagctgattgttaccgatatcaacaaagaggcagtccaaagggccgttgaggaatttggtgcgtcggcagtagaaccgaacgaaatctacggcgttgaatgcgacatttacgccccgtgtgcgctgggtgccacggtcaacgatgaaactatccctcagctgaaagctaaggttatcgctggcagcgccaacaatcagctgaaagaagaccgtcacggagatatcatacacgagatgggtatcgtgtatgcgccggattacgtgatcaacgcagggggcgttattaacgtggcggacgaattatacggctataaccgtgaacgcgctttgaaacgggttgaatctatttacgatactatcgcaaaagtaatcgaaatcagcaaacgtgatggtattgctacctacgtcgcagctgaccgcttggctgaagagcggatcgcatctttaaagaactcccgtagcacctatctgcgcaatggccatgatatcatatcgcgacgt

SEQ ID NO: 191 - DNA, 1077 bp, Artificial Sequence
  Synthetic polynucleotide
atgtcggacttcaagcattttgagtacatggcaaaacaccgttatgaacaggtcgtgtacttctatgataaaacgaccggtctcaaaggcataacttgtatccacaatacaacccttggtcccgctctgggaggcactcgcttgtggaactacgcgtccgaagaagatgccgttattgacgctctacggctggcacgtggtatgacttacaaagctgctgcggcaggcctgaacctgggcgggggtaagaccgttctgatcggtgatccagagaccgtaaaaagcgaaggctattttagagccctgggccgctacgttcaatctctgaacggaaggtacatcactgcggaagacgttaacacgtctaccaaagacatggatttcgtagctatggaaaccgactacgtggtgggtctggaagggaagagtggtaatccttccccgatgaccgctctgggcgccttccacggcattcgcgccgcgttacagtacaaatttggtaacgaggagttcagcaaatatacgttcgcagttcagggtgcgggtcagactggctattatctgatcaaaaagctggtcgaagctaaagcaaaaaaaatctacttttctgaaattaacccgaagcatatcgaacgtatgaaacgtgagcacccggatgtagaatttgtggaacctaaaaactacttcggtctgaacgtggatgttattgttccgtgcgctttgggcggggttctcaatgacgaaagcatcccgcaaattaaagcgaaagtaatcgcaggcactgctaacaatgtacttctggacgaagatatccatggcacaatgatcaaagaaaaaggtattctgtacgctccggacttcgtgatcaacgcaggtggcttaataaacgtctaccacgagctgaaggaatataacgtcggtcgtgcgacacgtgatatcgaaaagatttatgatcgcctgctggaaatctttaagatcgccgatactgaaaatattcacacccagcaggctgcgaaagttttcgccaaaaaacgtatcgaaaccatcaacaacgtgcaggacaactacattaaacgt

SEQ ID NO: 192 - DNA, 1098 bp, Artificial Sequence
  Synthetic polynucleotide
atgacactggagatctttgaataccttgaaaagtatgactacgagcaagtagtcttctgccaggataaagaaagtggcttgaaagcaattatagccatccacgacactacgctgggtcctgctttagggggcactcgcatgtggacctatgatagcgaagaagctgcgatcgaagatgctctacgtctggcgaaaggtatgacctacaaaaatgcagctgccggtctcaacctgggcggtgcgaagactgttattatcggcgacccccgaaaagacaaatccgaggcaatgttccgtgcgctgggacgctacattcagggtctgaacggcagatacatcaccgcttgggatgtgggtacaaccgttgatgacatggacattatccatgaagaaactgacttcgtgaccgggatctcaccaagctttggctcttctggtaacccgtccccggttacggcatatggcgtataccgcggcatgaaagctgctgcgaaagaagccttcggtactgataacctggaggggaaggtaattgcggttcagggtgtcggtaatgtggcttatcacctctgtaaacatctgcacgctgaaggcgctaagctgattgttaccgatatcaacaaagaagcagtccaaagggccgttgaggaatttggtgcgtcggcagtagagccgaatgaaatctacggcgttgaatgcgacatttacgccccgtgtgcgctgggtgccacggtcaacgatgaaactatccctcagctgaaagctaaggttatcgctggcagcgccaacaaccagctgaaagaagaccgtcatggagatatcatacacgaaatgggtatcgtgtatgcgccggattacgtgatcaacgcagggggcgttattaatgtggcggacgagttatacggctataaccgtgaacgcgctttgaaacgggttgaatctatttacgatactatcgcaaaagtaatcgaaatcagcaaacgtgatggtattgctacctacgtcgcagctgaccgcttggctgaagagcggatcgcatctttaaagaactcccgtagcacctatctgcgcaacggccacgatatcatatcgcgacgt

SEQ ID NO: 193 - DNA, 1077 bp, Artificial Sequence
  Synthetic polynucleotide
atgaacgacgtgaaggtttttgatctcatggagaaagacaaatacgaacaggtcgtatatttctacgataaaagtaccggtcttaaaggcataacggttatccataatacaaccctgggtcccgctctgggaggcactcgcatttggaactacgaatccgaagatgacgcgttgaaagattgtctacgactggcccgtggtatgacttataaggctgcggcagctgggcttaacctgggcggcggtaaaactgtactgatcggtgacccgaagatcgtgaaaagcgaggcatacttccgtggcctgggccggtatgtccaatcactgaacggtcgttacattaccgcagaagatgttaacacctctactaaagacatgtcgtacgtacacatggaaaccgactatgtggttggcttagaaggtaaatctggcaaccctagcccgtttacagccctgggagctttctacggtattaaggccgcactgaaataccgcttcaataatgagagcatcgaaaactacactttcgctgttcagggtgcgggtcagactggctactatctgatcaactatctgctgaacgcgggtgctaaaaaaatctatttttccgaaatcaacgaaagccacattgcgcgtatgaaaaaggagcacccggaggttatttacgtagaaccaaaagatatcttcaccctggacgttgatgtgttttgcccgtgcgctctcggtggcgttctgaatgacgaaaccatcaaggttctgaaagcaccgatcatcgctggtacggctaacaacgtattgctggatgagcagactcatggcaatgcccttctcgacaaagggatactgtacgcacctgatttcgtgatcaacgcaggtggcctgattaacgtctattacgaattaaacgactataccaaagaaaaggttgaacatgatattaaactaatctacgaccgcctgatccaagtttttgatatttctaagaatcagaacattccgactcagctggcggccaaagttttcgctaaaaacaggatcgaatccgtacgtaacttgcacgacaactacatcaaacgc

SEQ ID NO: 194 - DNA, 1098 bp, Artificial Sequence
  Synthetic polynucleotide
atgacactggagatctttgaataccttgaaaagtatgactacgagcaagtagtcttctgccaggataaagaaagtggcttgaaagcaattatagccatccacgacactacgctgggtcctgctttagggggcactcgcatgtggacctatgatagcgaagaagctgcgatcgaagatgctctacgtctggcgaaaggtatgacctacaaaaatgcagctgccggtctcaacctgggcggtgcgaagactgttattatcggcgacccccgaaaagacaaatccgaggcaatgttccgtgcgctgggacgctacattcagggtctgaacggcagatacatcaccgctcgtgatgtgggtacaaccgttgatgacatggacattatccatgaagaaactgacttcgtgaccgggatctcaccaagctttggctcttctggtaacccgtccccggttacggcatatggcgtataccgcggcatgaaagctgctgcgaaagaagccttcggtactgataacctggaggggaaggtaattgcggttcagggtgtcggtaatgtggcttatcacctctgtaaacatctgcacgctgaaggcgctaagctgattgttaccgatatcaacaaagaagcagtccaaagggccgttgaggaatttggtgcgtcggcagtagagccgaatgaaatctacggcgttgaatgcgacatttacgccccgtgtgcgctgggtgccacggtcaacgatgaaactatccctcagctgaaagctaaggttatcgctggcagcgccaacaaccagctgaaagaagaccgtcatggagatatcatacacgaaatgggtatcgtgtatgcgccggattacgtgatcaacgcagggggcgttattaatgtggcggacgagttatacggctataaccgtgaacgcgctttgaaacgggttgaatctatttacgatactatcgcaaaagtaatcgaaatcagcaaacgtgatggtattgctacctacgtcgcagctgaccgcttggctgaagagcggatcgcatctttaaagaactcccgtagcacctatctgcgcaacggccacgatatcatatcgaggcgt

SEQ ID NO: 195 - DNA, 1098 bp, Artificial Sequence
  Synthetic polynucleotide
atgacactggagatctttgaataccttgaaaagtatgactacgagcaagtagtcttctgccaggataaagaaagtggcttgaaagcaattatagccatccacgacactacgctgggtcctgctttagggggcactcgcatgtggacctatgatagcgaagaagctgcgatcgaagatgctctacgtctggcgaaaggtatgacctacaaatgtgcagctgccggtctcaacctgggcggtgcgaagactgttattatcggcgacccccgaaaagacaaatccgaggcaatgttccgtgcgctgggacgctacattcagggtctgaatggcagatacatcaccgctgaagatgtgggtacaaccgttgatgacatggacattatccatgaagaaactgacttcgtgaccgggatctcaccaagctttggctcttctggtaacccgtccccggttacggcatatggcgtataccgcggcatgaaagctgctgcgaaagaggccttcggtactgataacctggaagggaaggtaattgcggttcagggtgtcggtaatgtggcttatcacctctgcaaacatctgcacgctgaaggcgctaagctgattgttaccgatatcaacaaagaggcagtccaaagggccgttgaggaatttggtgcgtcggcagtagaaccgaacgaaatctacggcgttgaatgcgacatttacgccccgtgtgcgctgggtgccacggtcaacgatgaaactatccctcagctgaaagctaaggttatcgctggcagcgccaacaatcagctgaaagaagaccgtcatggagatatcatacacgagatgggtatcgtgtatgcgccggattacgtgatcaacgcagggggcgttattaacgtggcggacgaattatacggctataaccgtgaacgcgctttgaaacgggttgaatctatttacgatactatcgcaaaagtaatcgaaatcagcaaacgtgatggtattgctacctacgtcgcagctgaccgcttggctgaagagcggatcgcatctttaaagaactcccgtagcacctatctgcgcaatggccacgatatcatatcgcgacgt

SEQ ID NO: 196 - DNA, 1104 bp, Artificial Sequence
  Synthetic polynucleotide
atgacaacggacatcattaatagcaacgaactgcataaggttgatccagtatttgggcagatatccttcgatggccacgagcaagtggttttctgcaacgacaaagataccggtcttaaagccattatcggcatccacaacactgtattaggtccggctctgggtggcacccgtatgtggaaatattcgaacgaatgggaagcactcaatgacgtcttgcgcctgtctcgaggcatgtctttcaaatcaagtatcagcggtctgaacctgggcggtggaaaggcggtgattatcggcgacgctaaaactgagaaaactccggaactgatgagaaagtttggtgaatacgttgattctctgagcggtaaatacatcaccgctgaagacgtcggcatggagaccaaagatatggatactgttcgggaagtaaccaaatatgttactggcatctccgagagtaaaggtgggtccgggaacccttctcccattacggcatacggtgtgttcatgggaatgaaagcggcggtaaagcataagtttggcgttgacaatctggctggtaaacgtgttctggtccagggcatcggtcacgtgggtgaagttttagtacagcaccttactaacgaaggcgccattgtgaccattagcgacatcaacgagaaccgcctgcacgaagttggctcgaaatacggtgcaaagatattcacaggcaatgatctgtattctctggatgttgatatctacgctccgtgtgccctgggtgcaactatcaacgacgacaccattagcaaaatccaggctaaagtgattgcgggagctgcaaacaaccaactcgctaacgaagttatccatgggaaactactgaaagaaaaaggtatcctgtacgcaccggacttcctgatcaacgctggcggcgttatcaacgtttattccgaactggccaatttgacgtctgcgcaggtcatggagaaaaccgaaaatatttacaacaccgccatggatatcttcaacctctctgacgtgcagaacattactacacaccaagctgcgctgaatatcgcacagaaacgtattgacgaccgcaagaaagaattacagaacaaa

SEQ ID NO: 197 - DNA, 1059 bp, Artificial Sequence
  Synthetic polynucleotide
atgaacgtgttctcggatactgcgtttgacggccatgagcaagtagttttcgccagcgacccggatacgggtctgaagtccatcattgctgtgcacaatacaaacttagggccatcattgggtggttgccgcatgtggccctatgcaactgaacaggaagctatccacgacgttcttcgtctatctcggggcatgacctacaaatctgcactggctaacctccctctgggcggcggtaaaagcgtcattatcggtgatccgcgttcccagaaaaccccgcagctgttccgcgcgatggggcgtgcgatcgaacaggttggcggcagatacatagtggctgaggacgtaggtactactccggcagatatggttcagattgcttctcaaaccaaacatgtaggaggcatcaacgatggtaaagacccggcccgtaccggtgatcctagtccgtttacggcatatggcgttttcatgggactgaaggaagctgtacgttttaaaaatggtcacgacgacctgggcgggctgcgcgttgcggtccagggtctgggtaacgtaggctaccatctctgtcgtatgctgcacaaagccggcgctcagctggttgtggcagatcttaacgcgaacaacgtcaataacgctgttacagaatttggcgcgaccactgtgccagctgacgaaatcctgtacgcagacgtggatatcctggctccgtgcgccctgggtggggttattaatgatcacagcattaacaagatccgcgcgcgtatcattgcaggcgccgccaacaaccagttggaaagtgaccgccacggtgacatgctacgcgaggctgatatcctctacgcacccgactatgtgataaatgcgggtggtgtcgttgaggtgtactattgtcgtgaaggcaaaccggttaccgaaactaacaagcatatcgaaggtataggtgctactgtacgtgagatcttcgaaagggccaaacaacagaacctgtctaccggcttcgttgccgaccgtctggctgaagagcgattcggttctaaagcaaaaactgtgacc

SEQ ID NO: 198 - DNA, 1098 bp, Artificial Sequence
  Synthetic polynucleotide
atgacactggagatctttgaataccttgaaaagtatgactacgagcaagtagtcttctgccaggataaagaaagtggcttgaaagcaattatagccatccacgacactacgctgggtcctgctttagggggcactcgcatgtggacctatgatagcgaagaagctgcgatcgaagatgctctacgtctggcgaaaggtatgacctacaaaaatgcagctgccggtctcaacctgggcggtgcgaagactgttattatcggcgacccccgaaaagacaaatccgaggcaatgttccgtgcgctgggacgctacattcagggtctgaacggcagatacatcaccgctgaagatgtgggtacaaccgttgatgacatggacattatccatgaagaaactgacttcgtgaccgggatctcaccaagctttggctcttctggtaacccgtccccggttacggcatatggcgtataccgcggcatgaaagctgctgcgaaagaggccttcggtactgataacctggaagggaaggtaattgcggttcagggtgtcggtaatgtggcttatcacctctgtaaacatctgcacgctgaaggcgctaagctgattgttaccgatatcaacaaagaggcagtccaaagggccgttgaggaatttggtgcgtcggcagtagaaccgaatgaaatctacggcgttgaatgcgacatttacgccccgtgtgcgctgggtgccacggtcaacgatgaaactatccctcagctgaaagctaaggttatcgctggcagcgccaacaaccagctgaaagaagaccgtcatggagatatcatacacgagatgggtatcgtgtatgcgccggattacgtgatcaacgcagggggcgttattaatgtgaccgacgaattatacggctataaccgtgaacgcgctttgaaacgggttgaatctatttacgatactatcgcaaaagtaatcgaaatcagcaaacgtgatggtattgctacctacgtcgcggctgaccgcttggctgaagagcggatcgcatctttaaagaactcccgtagcacctatctgcgcaacggccacgatatcatatcgcgacgt

SEQ ID NO: 199 - DNA, 1101 bp, Artificial Sequence
  Synthetic polynucleotide
atgatcttcgagaagatggctcaggcagattacgaacaattagtgttttgccatgacgaaacgactggccttaaagcgattatctgtattcacgacaccacactcggtccggccctgggtggctgccgcttctggaattatgaaaccgaagaggaagctatcatcgatgtaatgcgtttggcaaaagggatgacttacaaaaacgctgcggccggtctaaacctgggcggcgctaaaactgtcgttattggtgatccaaaaaaggacaaatcagaagcgtttttccgggccctgggcaggtatatacacagcctggatggtcgctacatcaccgcagaggacgttggaactaccgttgaagacatggatatgatccatctggaaacaccgcacgtgtgcgggatttccgaaagttacggttctggcggtaacccttctccgatgacggctctgggcgtatattacgcgatgaaacgtactgctaaagaggccttcggtagcgactcgctgaagggaaaaaccgttgcggttcagggtgtaggtaatgtggcttttcatatgtgccagtacctgcacgatgaaggcgctcacctgattgtcaccgacatcaacgaggaagcagtccaaaacgccgttgaggcattcgatgcgcaggctgtagggatcgatgaaatctattctgttgacgcagacattttcgcaccctgtgcgctcggcggcgtgctgaacgatgaaactatcccgagcctgaaagctaagatggtatgtggttccgccaacaatcagctgttggaagagaaccgtcacggtcagatgctcgaaaaacgtggcatcatttacgctcccgacttcgtggtgaacagcggcggtgttattaacgtagcagatgaactgaacggctaccatcgtgagcgcgctgaaaagaaagttaaagctgtgtatgatcaaatggataagatctttaccatagccaaagaaactcatgttctgccgctgcaagccgcggaacacttagcagagtcccgcatcaatacgatgatgcgtgtgcactctaaatactcctcgaaacctaacaaccagctgcgtgacactcgcacccat

SEQ ID NO: 200 - DNA, 1098 bp, Artificial Sequence
  Synthetic polynucleotide
atgacactggagatctttgaataccttgaaaagtatgactacgagcaagtagtcttctgccaggataaagaaagtggcttgaaagcaattatagccatccacgacactacgctgggtcctgctttagggggcactcgcatgtggacctatgatagcgaagaagctgcgatcgaagatgctctacgtctggcgaaaggtatgacctacaaaaatgcagctgccggtctcaacctgggcggtgcgaagactgttattatcggcgacccccgaaaagacaaatccgaggcaatgttccgtgcgctgggacgctacattcagggtctgaacggcagatacatcaccgctgaagatgtgggtacaaccgttgatgacatggacattatccatgaagaaactgacttcgtgaccgggatctcaccaagctttggctcttctggtaacccgtccccggttacggcatatggcgtataccgcggcatgaaagctgctgcgaaagaggccttcggtactgataacctggaagggaaggtaattgcggttcagggtgtcggtaatgtggcttatcacctctgtaaacatctgcacgctgaaggcgctaagctgattgttaccgatatcaacaaagaggcagtccaaagggccgttgaggaatttggtgcgtcggcagtagaaccgaatgaaatctacggcgttgaatgcgacatttacgccccgtgtgcgctgggtgccacggtcaacgatgaaactatccctcagctgaaagctaaggttatcgctggcagcgccaacaaccagctgaaagaagaccgtcatggagatatcatacacgagatgggtatcgtgtatgcgccggattacgtgatcaacgcagggggcgttattaatgtgtgggacgaattatacggctataaccgtgaacgcgctttgaaacgggttgaatctatttacgatactatcgcaaaagtaatcgaaatcagcaaacgtgatggtattgctacctacgtcgcggctgaccgcttggctgaagagcggatcgcatctttaaagaactcccgtagcacctatctgcgcaacggccacgatatcatatcgcgacgt

SEQ ID NO: 201 - DNA, 1098 bp, Artificial Sequence
  Synthetic polynucleotide
atgacactggagatctttgaataccttgaaaagtatgactacgagcaagtagtcttctgccaggataaagaaagtggcttgaaagcaattatagccatccacgacactacgctgggtcctgctttagggggcactcgcatgtggacctatgatagcgaagaagctgcgatcgaagatgctctacgtctggcgaaaggtatgacctacaaaaatgcagctgccggtctcaactgtggcggtgcgaagactgttattatcggcgacccccgaaaagacaaatccgaggcaatgttccgtgcgctgggacgctacattcagggtctgaacggcagatacatcaccgctgaagatgtgggtacaaccgttgatgacatggacattatccatgaagaaactgacttcgtgaccgggatctcaccaagctttggctcttctggtaacccgtccccggttacggcatatggcgtataccgcggcatgaaagctgctgcgaaagaggccttcggtactgataacctggaagggaaggtaattgcggttcagggtgtcggtaatgtggcttatcacctctgcaaacatctgcacgctgaaggcgctaagctgattgttaccgatatcaacaaagaggcagtccaaagggccgttgaggaatttggtgcgtcggcagtagaaccgaatgaaatctacggcgttgaatgcgacatttacgccccgtgtgcgctgggtgccacggtcaacgatgaaactatccctcagctgaaagctaaggttatcgctggcagcgccaacaaccagctgaaagaagaccgtcatggagatatcatacacgagatgggtatcgtgtatgcgccggattacgtgatcaacgcagggggcgttattaatgtggcggacgaattatacggctataaccgtgaacgcgctttgaaacgggttgaatctatttacgatactatcgcaaaagtaatcgaaatcagcaaacgtgatggtattgctacctacgtcgcagctgaccgcttggctgaagagcggatcgcatctttaaagaactcccgtagcacctatctgcgcaacggccacgatatcatatcgcgacgt

SEQ ID NO: 202 - DNA, 1065 bp, Artificial Sequence
  Synthetic polynucleotide
atgacagtgttctcgcatcctcacgagcaagtagttttttgtcacgatccagccagcggcctgcgtgcgattatcggtttgtactccactgcactggggccgggtttaggaggcacgcgcttccatccgtatgcttctgaagctgacgctctggcggatgtccttaatctgtctcacggtatggcatacaagaacgctctggccggcctcgacctgggtggcggtaaagcggttatcattggcgacccgcgtactgataaatcagaagcactgctgagagcttacggacgctttgtagaaagtctggccggccgttattacaccgcgtgcgacgtgggtaccttcagccctgatatggacgttatcgctcgcgagacttcttatgtcaccggtcgtaccgtagaacacgggggtgcaggcgacagctccgttctcactgcttttggcgtgtaccagggtatgcgtgcggcagcgcagcatcgatggggtagtccctccctggctggccgcacggttggtgtagcgggcgttggtaaagttggacgtcacttagtctcgcatctggtcgaagaggatgcccgtgtggttgtaaccgatccggttgatgctgctgtgtcccacgtgctatctctgtcttctgacgtgcggagcgttgcgtccactgaagcactgcttgctgaaccgctggatgtatacgctccgtgcgccctgggcggggctctcactgatgctgtagttcagaccctcagcgcgggtatagtttgcggcggcgcaaacaaccagctagcccacccaggtgtggctaagctgctggacgaagctggtatcacttacgcacccgactactgcgtgaatgcgggcggtgtcattcaggtagcagacgaactggacggcttcgatttcgaccgtgctaaaaggcgtgccaccggtatctttgatactacactggcggttctggaacgagccgcatctgatggtaccaccaccgccgacgctgccgaccgtcaagctgagcagcgcatgcgtgaaatcggccgcttagggcaggtttggctgccgacacgt

SEQ ID NO: 203 - DNA, 1101 bp, Artificial Sequence
  Synthetic polynucleotide
atgaacacggacatcttgcatgcgggcgaactgaaaaaggctgatccagtatttgggcagctgtccttcgatgaccacgagcaaattgttttctgcaatgacaaagatacaggtctcaaagccatcatcggcattcacaacactgtgttaggtccggctctgggtggcacccgtatgtggaactataacagtgaatgggaagcactgaatgacgttcttcgcctgtctcgaggcatgactttcaaatcggcaatcaccggtctgaacctgggcggtggaaaggcggtcattatcggcgatgctaaaactcggaaaaccccggagctgatgcgcaggtttggtgaatttgtaaatacactgggtggcaaatacatcactgctgaagacgttggcatggagaccagcgacatggatttggtgcgtgatgttaccccttacgttactggagtcagcgaatctcgtggtggcgcgggcaacccgtcccctataactgcctatggtgtgtacatgggtatgaaggcggcagctgctcaccgtttcggtacggataaactggaaggcaaacaggtactggtgcaggggattggtcatgttggcgaatctctggtcgagcacttaacgaaagaaggggcccgtgttttcatcaccgacatcaacgaagaccgcctgcaagaagtaagcaagaaatacggtgctgttatatatgcaggcgacgatctctacaccgctgcggttgacatttatgcaccgtgtgcattaggagcgactatcaacgatgataccgtctacaaaatcaaggctggcgtggttgccggtgctgctaacaatcagctggctgacgagaacagacatgggaaaatcctgatggagcgcggtattgcttacgcgccagatttcctcatcaacgctggcggaattatcaacgtttacgccgaacttgaaggttacggtaaagatgagatcatccgtaaaactgaaaatatttatacaaccactctggaaatttttgcacactcagcaaaaaatggctgctctactcaccagtctgcgctgcgtgtagctcagggccggatcgacgcacgcaaacagggtaaaggcgca

SEQ ID NO: 204 - DNA, 1098 bp, Artificial Sequence
  Synthetic polynucleotide
atgacactggagatctttgaataccttgaaaagtatgactacgagcaagtagtcttctgccaggataaagaaagtggcttgaaagcaattatagccatccacgacactacgctgggtcctgctttagggaaaactcgcatgtggacctatgatagcgaagaagctgcgatcgaagatgctctacgtctggcgaaaggtatgacctacaaaaatgcagctgccggcctcaacctgggtggcgcgaagactgttattatcggtgacccccgaaaagacaagtccgaggcaatgttccgtgcgctgggacgctacattcagggcctgaacggtagatacatcaccgctgaagatgtgggtacaaccgttgatgacatggacattatccatgaagaaactgacttcgtgaccgggatctcaccaagctttggctcttctggtaacccgtccccggttacggcatatggcgtataccgcggcatgaaagctgctgcgaaagaggccttcggtactgataacctggaaggaaaagtaattgcggttcagggtgtcggtaatgtggcttatcacctctgtaaacatctgcacgctgaaggcgctaagctgattgttaccgatatcaacaaagaggcagtccaaagggccgttgaggaatttggcgcgtcggcagtagaaccgaatgaaatctacggtgttgaatgcgacatttacgccccgtgtgcgctgggcgccacggtcaacgatgaaactatccctcagctgaaagctaaggttatcgctggaagcgccaacaaccagctgaaagaagaccgtcatggggatatcatacacgagatgggtatcgtgtatgcgccggattacgtgatcaacgcagggggtgttattaatgtggcggacgaattatacggctataaccgtgaacgcgctttgaagcgggttgaatctatttacgatactatcgcaaaagtaatcgaaatcagcaaacgtgatggtattgctacctacgtcgcagctgaccgcttggctgaagagcggatcgcatctttaaaaaactcccgtagcacctatctgcgcaacggccacgatatcatatcgcgacgt

SEQ ID NO: 205 - DNA, 1098 bp, Artificial Sequence
  Synthetic polynucleotide
atgacactggagatctttgaataccttgaaaagtatgactacgagcaagtagtcttctgccaggataaagaaagtggcttgaaagcaattatagccatccacgacactacgctgggtcctgctttagggggcactcgcatgtggacctatgatagcgaagaagctgcgatcgaagatgctctacgtctggcgaaaggtatgacctacaaaaatgcagctgccggtctcaacctgggcggtgcgaagactgttattatcggcgacccccgaaaagacaaatccgaggcaatgttccgtgcgctgggacgctacattcagggtctgaacggcagatacatcacctcagaagatgtgggtacaaccgttgatgacatggacattatccatgaagaaactgacttcgtgaccgggatctctccaagctttggctcttccggtaacccgtctccggttacggcttatggcgtataccgcggcatgaaagctgctgcaaaagaggccttcggtactgataacctggaagggaaggtaattgcggttcagggtgtcggtaatgtggcttatcacctctgtaaacatctgcacgctgaaggcgctaagctgattgttaccgatatcaacaaagaggcggtccaaagggcagttgaggaatttggtgcgagcgcagtagaaccgaatgaaatctacggcgttgaatgcgacatttacgccccgtgtgcgctgggtgccacggtcaacgatgaaactatccctcagctgaaagccaaggttatcgctggctcggcaaacaaccagctgaaagaagaccgtcatggagatatcatacacgagatgggtatcgtgtatgcgccggattacgtgatcaacgctgggggcgttattaatgtggcggacgaattatacggctataaccgtgaacgcgctttgaaacgggttgaatccatttacgatactatcgcaaaagtaatcgaaatcagcaaacgtgatggtattgctacctacgtcgcagctgaccgcttggctgaagagcggatcgcatctttaaagaactctcgtagcacctatctgcgcaacggccacgatatcatatcgcgacgt

SEQ ID NO: 206 - DNA, 1098 bp, Artificial Sequence
  Synthetic polynucleotide
atgacactggagatctttgaataccttgaaaagtatgactacgagcaagtagtcttctgccaggataaagaaagtggcttgaaagcaattatagccatccacgacactacgctgggtcctgctttagggggcactcgcatgtggacctatgatagcgaagaagctgcgatcgaagatgctctacgtctggcgaaaggtatgacctacaaaaatgcagctgccggtctcaacctgggcggtgcgaagactgttattatcggcgacccccgaaaagacaaatccgaggcaatgttccgtgcgctgggacgctacattcagggtctgaacggcagatacatcaccgctgaagatgtgggtacaaccgttgatgacatggacattatccatgaagaaactgacttcgtgaccgggatctcaccaagctttggctcttctggtaacccgtccccggttacggcatatggcgtataccgcggcatgaaagctgctgcgaaagaggccttcggtactgataacctggaagggaaggtaattgcggttcagggtgtcggtaatgtggcttatcacctctgtaaacatctgcacgctgaaggcgctaagctgattgttaccgatatcaacaaagaggcagtccaaagggccgttgaggaatttggtgcgtcggcagtagaaccgaatgaaatctacggcgttgaatgcgacatttacgccccgtgtgcgctgggtgccacggtcaacgatgaaactatccctcagctgaaagctaaggttatcgctggcagcgccaacaaccagctgaaagaagaccgtcatggagatatcatacacgagatgggtatcgtgtatgcgccggattacgtgatcaacgcagggggcgttattaatgtggcggacgaatcttacggctataaccgtgaacgcgctttaaaacgggttgaatccatttacgatactatcgcaaaagtaatcgaaatcagcaaacgtgatggtattgctacctacgtcgcagctgaccgcttggctgaagagcggatcgcatctttaaagaactctcgtagcacctatctgcgcaacggccacgatatcatatcgcgacgt

SEQ ID NO: 207 - DNA, 1098 bp, Artificial Sequence
  Synthetic polynucleotide
atgacactggagatctttgaataccttgaaaagtatgactacgagcaagtagtcttctgccaggataaagaaagtggcttgaaagcaattatagccatccacgacactacgctgggtcctgctttagggggcactcgcatgtggacctatgatagcgaagaagctgcgatcgaagatgctctacgtctggcgaaaggtatgacctacaaaaatgcagctgccggtctcaacctgggcggtgcgaagactgttattatcggcgacccccgaaaagacaaatccgaggcaatgttccgtgcgctgggacgctacattcagggtctgaacggcagatacatcaccgctgaagatgtgggtacaaccgttgatgacatggacattatccatgaagaaactgacttcgtgaccgggatctcaccaagctttggctcttctggtaacccgtccccggttacggcatatggcgtataccgcggcatgaaagctgctgcgaaagaggccttcggtactgataacctggaagggaaggtaattgcggttcagggtgtcggtaatgtggcttatcacctctgtaaacatctgcacgctgaaggcgctaagctgattgttaccgatatcaacaaagaggcagtccaaagggccgttgaggaatttggtgcgtcggcagtagaaccgaatgaaatctacggcgttgaatgcgacatttacgccccgtgtgcgctgggtgccacggtcaacgatgaaactatccctcagctgaaagctaaggttatcgctggcagcgccaacaaccagctgaaagaagaccgtcatggagatatcatacacgagatgggtatcgtgtatgcgccggattacgtgatcaacgcagggggcgttattaatgtggcggacgaatggtacggctataaccgtgaacgcgctttaaaacgggttgaatctatttacgatactatcgcaaaagtaatcgaaatcagcaaacgtgatggtattgctacctacgtcgcagctgaccgcttggctgaagagcggatcgcatctttaaagaactcccgtagcacctatctgcgcaacggccacgatatcatatcgcgacgt

SEQ ID NO: 208 - DNA, 1101 bp, Artificial Sequence
  Synthetic polynucleotide
atgacagcggagctcttgaaagcaaacgaactgcataaggttgacccagtatttgggcaggtgtccttcgatggccacgaacaagtcgttttctgccacgacaaagatacgggtctgaaagctattatcggcatccataatactgtgttaggtccggctctgggtggcacccgtatgtggaactataccaacgaatgggaggccctgaatgacgttcttcgcctgtctcgaggcatgactttcaaaaactcgattagcggtctgaacctgggcggtggaaaggcggtaatcataggcgatgccaaaactcagaaatccccggaactgatgagacggtttggtcagttcgttgactctctgagcggtaaatacatcaccgctgaagatgtaggcatggagaccaaggacatggatactgttaacgaagtgaccaaacacgttgctggcatctcagtggaacgtggtgggagtgggaacccttcccccgttacggcatacggtgtctttatgggaatgaaagcggcggcaaagtataaatacggctctgactctcttgaaggtaaaaaagttctggtccagggcattggtcacgtaggtgaggtcttagtacaacatctcactgaaagcggcgctttggtgaccattacggatatcaatgaggaccgcgttaaccaggttggcgcaaaatacggtgctaagatctatactggcgctgatctgtacagtgccgacgtcgatatctatgctccgtgtgcgctgggtgcaaccattaacgatgcgacaatcaacaatattaaagcttcaatcatcgccggggctgcgaacaaccagctggctaatgaagctgtgcacggtaagatcctgaaagaaaaaggcattctgtacgcgccggacttcttgatcaacgcaggcggcgttataaacgtttacagcgaattggttaaatggactaacgcccaagtgatggaaaaaactgaaaatatctacaacaccgctctggagatttttaaattcgcggacgataacaatatcaccactcatcaggcagctttctccatggcacagaaacgcatagacgacgccaagaatgaactgaaaaaa

SEQ ID NO: 209 - DNA, 1080 bp, Artificial Sequence
  Synthetic polynucleotide
atgacagacgtgaccgatggtgtactccatacgcttttccacagcgaccagggcgggcacgagcaagtcgttctgtgccaggatcgcgccagtggcttgaaggcagttatcgcgattcattctactgctctgggtcccgctctgggaggtaccagattttacccttatgcgtccgaagaagctgccgttgcagatgctttaaatctggcacgtggcatgtcatacaaaaacgcgatggctggcctggaccacggtggtggcaaagccgtgatcattggcgacccggataaaatcaagtctgatgaactgctgctggcgtacggtcgtttcgtagcttcgttagggggtcgttatgtcactgcctgtgacgttggcacttacgtggcagacatggacgttgtagctagggagaaccgttggaccactggtcgcagcccagaacacggcggcgcgggtgattcctctgtcctgactgcatttggcgttttccagggtatgcgcgctagcgcgcagcacctttggggtgaagcttcactccgtggccgtaaagttggtgtggccggcgtcggtaaagtaggacatatactggttgaacacctgctcgaagacggcgcagaggttgtgatcaccgatgtacgtgaagactccctgctgcggattacttctaaacatccggaagtaacagcggttgctgataccgatacgctgatccgcacggaaggtctggatgtgtatgctccgtgcgctctgggtggagcgctggacgatgataccgttccggtgctgaccgcgcgtgtagtatgtggcgcagctaacaatcaactggcccatccgggggtggagaaagaccttgctgaccgtgggatcctgtacgctccggactacgttgtcaacgcgggcggtgtcatccaggttgcagatgagttgcacggtttcgatttcgatcgctgcaaggaaaaagcttctaaaatttttgacactaccgttgccatctttgcccgtgcaaagcaggacggcattccaccagctgctgcggcagatcgcatcgctgaacaacgtatcgcggaagcgcgcggccgt

SEQ ID NO: 210 - DNA, 1098 bp, Artificial Sequence
  Synthetic polynucleotide
atgacactggagatctttgaataccttgaaaagtatgactacgagcaagtagtcttctgccaggataaagaaagtggcttgaaagcaattatagccatccacgacactacgctgggtcctgctttagggggcactcgcatgtggacctatgatagcgaagaagctgcgatcgaagatgctctacgtctggcgaaaggtatgacctacaaaaatgcagctgccggtctcaacctgggcggtgcgaagactgttattatcggcgacccccgaaaagacaaatccgaggcaatgttccgtgcgctgggacgctacattcagggtctgaacggcagatacatcaccgctgaagatgtgggtacaaccgttgatgacatggacattatccatgaagaaactgacttcgtgaccgggatctcaccaagctttggctcttctggtaacccgtccccggttacggcatatggcgtataccgcggcatgaaagctgctgcgaaagaggccttcggtactgataacctggaagggaaggtaattgcggttcagggtgtcggtaatgtggcttatcacctctgtaaacatctgcacgctgaaggcgctaagctgattgttaccgatatcaacaaagaggcagtccaaagggccgttgaggaatttggtgcgtcggcagtagaaccgaatgaaatctacggcgttgaatgcgacatttacgccccgtgtgcgctgggtgccacggtcaacgatgaaactatccctcagctgaaagctaaggttatcgctggcagcgccaacaaccagctgaaagaagaccgtcatggagatatcatacacgagatgggtatcgtgtatgcgccggattacgtgatcaacgcagggggcgttattaatgaggcggacgaattatacggctataaccgtgaacgcgctttgaaacgggttgaatctatttacgatactatcgcaaaagtgatcgaaatcagcaaacgtgatggtattgctacctacgtagcagctgaccgcttggctgaagagcggatcgcatctttaaagaactcccgtagcacctatctgcgcaacggccacgatatcatatcgcgacgt

SEQ ID NO: 211 - DNA, 1098 bp, Artificial Sequence
  Synthetic polynucleotide
atgacactggagatctttgaataccttgaaaagtatgactacgagcaagtagtcttctgccaggataaagaaagtggcttgaaagcaattatagccatccacgacactacgctgggtcctgctttagggggcactcgcatgtggacctatgatagcgaagaagctgcgatcgaagatgctctacgtctggcgaaaggtatgacctacaaaaatgcagctgccggtctcaacctgggcggtgcgaagactgttattatcggcgacccccgaaaagacaaatccgaggcaatgttccgtgcgctgggacgctacattcagggtctgaacggcagatacatcaccgctgaagatgtgggtacaaccgttgatgacatggacattatccatgaagaaactgacttcgtgtatgggatctcaccaagctttggctcttctggtaacccgtccccggttacggcatatggcgtataccgcggcatgaaagctgctgcgaaagaggccttcggtaccgataacctggaagggaaggtaattgcggttcagggtgtcggtaatgtggcttaccacctctgtaaacatctgcacgctgaaggcgctaagctgattgttactgatatcaacaaagaggcagtccaaagggccgttgaggaatttggtgcgtcggcagtagaaccgaatgaaatctacggcgttgaatgcgacatttacgccccgtgtgcgctgggtgccacggtcaacgatgaaactatccctcagctgaaagctaaggttatcgctggcagcgccaacaaccagctgaaagaagaccgtcatggagatatcatacacgagatgggtatcgtgtatgcgccggattacgtgatcaacgcagggggcgttattaatgtggcggacgaattatacggctataaccgtgaacgcgctttgaaacgggttgaatctatttacgatactatcgcaaaagtaatcgaaatcagcaaacgtgatggtattgctacctatgtcgcagctgaccgcttggctgaagagcggatcgcatctttaaagaactcccgtagcacctatctgcgcaacggccacgatatcatatcgcgacgt

SEQ ID NO: 212 - DNA, 1098 bp, Artificial Sequence
  Synthetic polynucleotide
atgacactggagatctttgaataccttgaaaagtatgactacgagcaagtagtcttctgccaggataaagaaagtggcttgaaagcaattatagccatccacgacactacgctgggtcctgctttagggggcactcgcatgtggacctatgatagcgaagaagctgcgatcgaagatgctctacgtctggcgaaaggtatgacctacaaaaatgcagctgccggtctcaacctgggcggtgcgaagactgttattatcggcgacccccgaaaagacaaatccgaggcaatgttccgtgcgctgggacgctacattcagggtctgaacggcagatacatcaccgtggaagatgttggtacaaccgttgatgacatggacattatccatgaagaaactgacttcgtgaccgggatctcaccaagctttggctcttctggtaacccgtccccggtcacggcttatggcgtataccgcggcatgaaagctgctgcaaaagaggccttcggtactgataacctggaagggaaggttattgcggttcagggtgtgggtaatgtagcttatcacctctgtaaacatctgcacgctgaaggcgctaagctgattgtcaccgatatcaacaaagaggcggttcaaagggcagttgaggaatttggtgcgtcggcagtagaaccgaatgaaatctacggcgttgaatgcgacatttacgccccgtgtgcgctgggtgccacggtaaacgatgaaactatccctcagctgaaagccaaggttatcgctggcagcgcaaacaaccagctgaaagaagaccgtcatggagatatcatacacgagatgggtatcgtgtatgcgccggattacgtgatcaacgctgggggcgttattaatgtggcggacgaattatacggctataaccgtgaacgcgctttgaaacgggttgaatctatttacgatactatcgcaaaagtaatcgaaatcagcaaacgtgatggtattgctacctacgtcgcagctgaccgcttggctgaagagcggatcgcatctttaaagaactcccgtagcacctatctgcgcaacggccacgatatcatatcgcgacgt

SEQ ID NO: 213 - DNA, 1077 bp, Artificial Sequence
  Synthetic polynucleotide
atgacagacgtgttcggtgctagccacaaagatgtccatgaacaggttgtattttgcgcggacgagcaatctgggctccgtgcaatcattgcgatccacaacaccgctctgggcccagccttgggtggcacgcgcttctacccctatgaatcggaatccgcagctttagcggatgttcttaatctggccaagggtatggcttacaaaaacgccctggctggcctggatctgggcggtggtaaagcagtaattatcggagaccctgctcgagacaaaagtgaggcgctgctgcgtgcatacggccggtttgtggaatctctgggcggacgttatataaccgcctgtgatgttggtacttacagcgaagatatggacgtcgttgctcgcgaatcccgcttcgtgactggtaggactaccgctaacggcggtgcaggcgattcttctatcctgactgcgttcggtgttttccaggggatgcgtgcatcagctgagcgtgtatatggcaccccgagcctacatggtagacgcgtgggtgtggaaggagttggcaaagttggccaccgtcttgttgagctgctgcgtgaagacggtgcggaagtagtcatttgcgacgtcgatccgaaggctgtagaacgtgtgcgcttacggcacccggaagtagacgttgttgcggatgctcgtacactgatggcttccgacctggatgtgtttgccccgtgcgccctaggtggggctctggatgatgaaaccgttactaccctccgcgcgaaaatcgtttgcggcgcagcaaataaccagctcgcccacccgggcgtggaaaagcagctggcagagcgtggtatcctgtacgctcctgactacgtggtgaacagcggcggtgtcattcaggtagcagacgaaatcgggggcttcgacatggagcgtgctcgcagcaaagctgcacaaatatatgatactacgctgaaaatctttgctatcgcggcagatgaaggtgttccgccagccgtagctgctgaccgtctggccgaaaggcgcatgtctgaagtcggccgtattagggcgatttggctgggtcat

SEQ ID NO: 214 - DNA, 1095 bp, Artificial Sequence
  Synthetic polynucleotide
atgaacctgttcacaaaaatggtggagcgtgactatgaacaactcgtagtttgccaggataagacctcaggcttgaaagcaattatagccattcacgacacgactcttggtccagcgttagggggcactagaatgtggaattacgaaaccgaagaggaagcttttgaagatgtcctgcgcctgtcccgtggtatgacttacaaaaacgctgctgcgggtctgaacctgggcggcggtaaagcagttatcatcggagacgcccgcaaggataaaaaccaggaaatgttccgggctttcggtcgttacatccagggcctgaacggacgttatatcactgcggaagatgtaggcaccaccgttgaggacatggacatcattcatgatgagaccgactacgtgacgggtatctcgcctgcttttggtgcatctgggaaccccagcccggtcaccgcgtatggtgtttatgtgggcatgaaagccgctgcaaaggcgggcctggggagtgaagatctggctggcaaaactattgctgttcaaggtgtaggtaatgtcgcataccacctttgtaaatacctgcataaagaaggcgccaatttaatcgttacagacatttacaaaccgagcgtagatcgcgcggtgactgaatttggtgccaaggctgttgctccggacgagatctaccaggttgattgcgatatcttcgcgccgtgtgctctgggtggcgttatcaacgatgaaaccttgacccagatcaaagcaaaagttattgcaggtgctgcgaacaaccagctaaaggaggaaaaacacggcgaacgtctacaggaaatgggaatcgcgtacgctccggactatgtaattaacgcgggcggtgtcatcaacgtggccgacgaactgaatggttacaaccgtgatcgcgctttcaaaaaagttgaaggcatctatgaaaatgtgtctcgtgtctttgaaattgctaaagcccagaacatcccgactttccttgcagcggacaaaatggctgaggaacgcattgagcgtatgcgatacgctcgcggtactttcctgcaaaacgaacaccatatcctgtctcgtaagaaa

SEQ ID NO: 215 - DNA, 1098 bp, Artificial Sequence
  Synthetic polynucleotide
atgacactggagatctttgaataccttgaaaagtatgactacgagcaagtagtcttctgccaggataaagaaagtggcttgaaagcaattatagccatccacgacactacgctgggtcctgctttagggggcactcgcatgtggacctatgatagcgaagaagctgcgatcgaagatgctctacgtctggcgaaaggtatgacctacaaaaatgcagctgccggtctcaacctgggcggtgcgaagactgttattatcggcgacccccgaaaagacaaatccgaggcaatgttccgtgcgctgggacgctacattcagggtctgaacggcagatacatcacccaggaagatgtgggtacaaccgttgatgacatggacattatccatgaagaaactgacttcgtgaccgggatctcaccaagctttggctcttctggtaacccgtccccggttacggcttatggcgtataccgcggcatgaaagctgctgcaaaagaggccttcggtactgataacctggaagggaaggtaattgcggttcagggtgtcggtaatgtggcttatcacctctgtaaacatctgcacgctgaaggcgctaagctgattgttaccgatatcaacaaagaggcggtccaaagggcagttgaggaatttggtgcgtcggcagtagaaccgaatgaaatctacggcgttgaatgcgacatttacgccccgtgtgcgctgggtgccacggtcaacgatgaaactatccctcagctgaaagccaaggttatcgctggcagcgcaaacaaccagctgaaagaagaccgtcatggagatatcatacacgagatgggtatcgtgtatgcgccggattacgtgatcaacgctgggggcgttattaatgtggcggacgaattatacggctataaccgtgaacgcgctttgaaacgggttgaatctatttacgatactatcgcaaaagtaatcgaaatcagcaaacgtgatggtattgctacctacgtcgcagctgaccgcttggctgaagagcggatcgcatctttaaagaactcccgtagcacctatctgcgcaacggccacgatatcatatcgcgacgt

SEQ ID NO: 216 - DNA, 1086 bp, Artificial Sequence
  Synthetic polynucleotide
atgacaaacgtgttcggttctccgcacaaagggtcaggccctagccatgagcaagtagtcttttgtcaggatgaagcatccggcctccgtgcgatcattgccatctatagtacggctttaggtccctcgctgggtggcacccgcttctacccgtacggttccgaagacgaagctttgactgacgttctgaatctgtctcgtgctatggcatataagaacgcgctagctggcctggatcttggaggtggcaaagccgttattatcggtgacccagagctggataaaagcgaagcactgctgcgggcgtacggccgctttgtgcagagcctgaacgggcgttactataccgcttgcgatgtaggtacttactctgaagacatggatgttatagcccgcgagagcacctacgtgactggccgtacggttgcacacggtggtgctggtgactcctctgtgctgactgcgtacggcgtcttccagggcatgcgtgcggctgcccaggcactgtgggggagtccgaccctgcggggccgtagggttggaatcgaaggtgtaggcaaagttggtcatcgcctcgtcgaacacttgcgtgaggatggggctgaagtcgttatttgcgacgtatccgaagcagctgtggaccgtgtgcgccgtctgcacccggaggttgaagttgttgccgatggcgatgctctggtaaagactgacctggatgtttactctccgtgcgcgcttggtggctcgttgaacgatgaaaccgttccactgttacgcgctcgaatcgtatgtggtggtgcaaataaccagctggctcaccctggcgtggaaaaacgcctggccgaccgtggaatcctctatgcgccggactatgtggtcaacgccggtggggtgatccaagttgcggacgaaattgaaggcttctcctttgagagagctaaagcaaaagcgactcagattttcgataccactgctcgtatcttcgcactggctgctgaagaaggtgtcccgccagccgtggctgccgatcgtctggcggaacgtcgtatgaccgctgttgggcgcttgcgcggcatctttctcaatggc

SEQ ID NO: 217 - DNA, 1098 bp, Artificial Sequence
  Synthetic polynucleotide
atgacactggagatctttgaataccttgaaaagtatgactacgagcaagtagtcttctgccaggataaagaaagtggcttgaaagcaattatagccatccacgacactacgctgggtcctgctttagggggcactcgcatgtggacctatgatagcgaagaagctgcgatcgaagatgctctacgtctggcgaaaggtaaaacctacaaaaatgcagctgccggtctcaacctgggcggtgcgaagactgttattatcggcgacccccgaaaagacaagtccgaggcaatgttccgtgcgctgggacgctacattcagggtctgaacggcagatacatcaccgctgaagatgtgggtacaaccgttgatgacatggacattatccatgaagaaactgacttcgtgaccgggatctcaccaagctttggctcttctggtaacccgtccccggttacggcatatggcgtataccgcggcatgaaagctgctgcgaaagaggccttcggtactgataacctggaagggaaagtaattgcggttcagggtgtcggtaatgtggcttatcacctctgtaaacatctgcacgctgaaggcgctaagctgattgttaccgatatcaacaaagaggcagtccaaagggccgttgaggaatttggtgcgtcggcagtagaaccgaatgaaatctacggcgttgaatgcgacatttacgccccgtgtgcgctgggtgccacggtcaacgatgaaactatccctcagctgaaagctaaggttatcgctggcagcgccaacaaccagctgaaagaagaccgtcatggagatatcatacacgagatgggtatcgtgtatgcgccggattacgtgatcaacgcagggggcgttattaatgtggcggacgaattatacggctataaccgtgaacgcgctttgaagcgggttgaatctatttacgatactatcgcaaaagtaatcgaaatcagcaaacgtgatggtattgctacctacgtcgcagctgaccgcttggctgaagagcggatcgcatctttaaaaaactcccgtagcacctatctgcgcaacggccacgatatcatatcgcgacgt

SEQ ID NO: 218 - DNA, 1098 bp, Artificial Sequence
  Synthetic polynucleotide
atgacactggagatctttgaataccttgaaaagtatgactacgagcaagtagtcttctgccaggataaagaaagtggcttgaaagcaattatagccatccacgacactacgctgggtcctgctttagggggcactcgcatgtggacctatgatagcgaagaagctgcgatcgaagatgctctacgtctggcgaaaggtatgacctacaaaaatgcagctgccggtctcaaccagggcggtgcgaagactgttattatcggcgacccccgaaaagacaaatccgaggcaatgttccgtgcgctgggacgctacattcagggtctgaacggcagatacatcaccgctgaagatgtgggtacaaccgttgatgacatggacattatccatgaagaaactgacttcgtgaccgggatctcaccaagctttggctcttctggtaacccgtccccggttacggcatatggcgtataccgcggcatgaaagctgctgcgaaagaggccttcggtactgataacctggaagggaaggtaattgcggttcagggtgtcggtaatgtggcttatcacctctgtaaacatctgcacgctgaaggcgctaagctgattgttaccgatatcaacaaagaggcagtccaaagggccgttgaggaatttggtgcgtcggcagtagaaccgaatgaaatctacggcgttgaatgcgacatttacgccccgtgtgcgctgggtgccacggtcaacgatgaaactatccctcagctgaaagctaaggttatcgctggcagcgccaacaaccagctgaaagaagaccgtcatggagatatcatacacgagatgggtatcgtgtatgcgccggattacgtgatcaacgcagggggcgttattaatgtggcggacgaattatacggctataaccgtgaacgcgctttgaaacgggttgaatctatttacgatactatcgcaaaagtaatcgaaatcagcaaacgtgatggtattgctacctacgtcgcagctgaccgcttggctgaagagcggatcgcatctttaaagaactcccgtagcacctatctgcgcaacggccacgatatcatatcgcgacgt

SEQ ID NO: 219 - DNA, 1098 bp, Artificial Sequence
  Synthetic polynucleotide
atgacactggagatctttgaataccttgaaaagtatgactacgagcaagtagtcttctgccaggataaagaaagtggcttgaaagcaattatagccatccacgacactacgctgggtcctgctttagggggcactcgcatgtggacctatgatagcgaagaagctgcgatcgaagatgctctacgtctggcgaaaggtatgacctacaaaaatgcagctgccggtctcaacctgggcggtgcgaagactgttattatcggcgacccccgaaaagacaaatccgaggcaatgttccgtgcgctgggacgctacattcagggtctgaacggcagatacatcaccgctgaagatgtgggtacaaccgttgatgacatggacattatccatgaagaaactgacttcgtgctggggatctcaccaagctttggctcttctggtaacccgtccccggttacggcatatggcgtataccgcggcatgaaagctgctgcgaaagaggccttcggtaccgataacctggaagggaaggtaattgcggttcagggtgtcggtaatgtggcttatcacctctgtaaacatctgcacgctgaaggcgctaagctgattgttactgatatcaacaaagaggcagtccaaagggccgttgaggaatttggtgcgtcggcagtagaaccgaatgaaatctacggcgttgaatgcgacatttacgccccgtgtgcgctgggtgccacggtcaacgatgaaactatccctcagctgaaagctaaggttatcgctggcagcgccaacaaccagctgaaagaagaccgtcatggagatatcatacacgagatgggtatcgtgtatgcgccggattacgtgatcaacgcagggggcgttattaatgtggcggacgaattatacggctataaccgtgaacgcgctttaaaacgggttgaatctatttacgatactatcgcaaaagtaatcgaaatcagcaaacgtgatggtattgctacctacgtcgcagctgaccgcttggctgaagagcggatcgcatctttaaagaactcccgtagcacctatctgcgcaacggccacgatatcatatcgcgacgt

SEQ ID NO: 220 - DNA, 1098 bp, Artificial Sequence
  Synthetic polynucleotide
atgacactggagatctttgaataccttgaaaagtatgactacgagcaagtagtcttctgccaggataaagaaagtggcttgaaagcaattatagccatccacgacactacgctgggtcctgctttagggggcactcgcatgtggacctatgatagcgaagaagctgcgatcgaagatgctctacgtctggcgaaaggtatgacctacaaaaatgcagctgccggtctcaacctgggcggtgcgaagactgttattatcggcgacccccgaaaagacaaatccgaggcaatgttccgtgcgctgggacgctacattcagggtctgaacggcagatacatcaccgctctggatgtgggtacaaccgttgatgacatggacattatccatgaagaaactgacttcgtgaccgggatctcaccaagctttggctcttctggtaacccgtccccggttacggcatatggcgtataccgcggcatgaaagctgctgcgaaagaagccttcggtactgataacctggaggggaaggtaattgcggttcagggtgtcggtaatgtggcttatcacctctgtaaacatctgcacgctgaaggcgctaagctgattgttaccgatatcaacaaagaagcagtccaaagggccgttgaggaatttggtgcgtcggcagtagagccgaatgaaatctacggcgttgaatgcgacatttacgccccgtgtgcgctgggtgccacggtcaacgatgaaactatccctcagctgaaagctaaggttatcgctggcagcgccaacaaccagctgaaagaagaccgtcatggagatatcatacacgaaatgggtatcgtgtatgcgccggattacgtgatcaacgcagggggcgttattaatgtggcggacgagttatacggctataaccgtgaacgcgctttaaaacgggttgaatctatttacgatactatcgcaaaagtaatcgaaatcagcaaacgtgatggtattgctacctacgtcgcagctgaccgcttggctgaagagcggatcgcatctttaaagaactcccgtagcacctatctgcgcaacggccacgatatcatatcgcgacgt

SEQ ID NO: 221 - DNA, 1098 bp, Artificial Sequence
  Synthetic polynucleotide
atgacactggagatctttgaataccttgaaaagtatgactacgagcaagtagtcttctgccaggataaagaaagtggcttgaaagcaattatagccatccacgacactacgctgggtcctgctttagggggcactcgcatgtggacctatgatagcgaagaagctgcgatcgaagatgctctacgtctggcgaaaggtatgacctacaaaaatgcagctgccggtctcaacctgggcggtgcgaagactgttattatcggcgacccccgaaaagacaaatccgaggcaatgttccgtgcgctgggacgctacattcagggtctgaacggcagatacatgaccgctgaagatgtgggtacaaccgttgatgacatggacatcatccatgaagaaactgacttcgtgaccgggatttcaccaagctttggctcttctggtaacccgtccccggttacggcatatggcgtataccgcggcatgaaagctgctgcgaaagaggccttcggtactgataacctggaagggaaggtaatcgcggttcagggtgtcggtaatgtggcttatcacctctgtaaacatctgcacgctgaaggcgctaagctgattgttaccgatatcaacaaagaggcagtccaaagggccgttgaggaatttggtgcgtcggcagtagaaccgaatgaaatctacggcgttgaatgcgacatttacgccccgtgtgcgctgggtgccacggtcaacgatgaaactatccctcagctgaaagctaaggttatcgctggcagcgccaacaaccagctgaaagaagaccgtcatggagatataatccacgagatgggtattgtgtatgcgccggattacgtgatcaacgcagggggcgttatcaatgtggcggacgaattatacggctataaccgtgaacgcgctttgaaacgggttgaatctatttacgatactattgcaaaagtaatcgaaatcagcaaacgtgatggtattgctacctacgtcgcagctgaccgcttggctgaagagcggatcgcatctttaaagaactcccgtagcacctatctgcgcaacggccacgatatcatatcgcgacgt

SEQ ID NO: 222 - DNA, 1098 bp, Artificial Sequence
  Synthetic polynucleotide
atgacactggagatctttgaataccttgaaaagtatgactacgagcaagtagtcttctgccaggataaagaaagtggcttgaaagcaattatagccatccacgacactacgctgggtcctgctttagggggcactcgcatgtggacctatgatagcgaagaagctgcgatcgaagatgctctacgtctggcgaaaggtatgacctacaaaaatgcagctgccggttacaacctgggcggtgcgaagactgttattatcggcgacccccgaaaagacaaatccgaggcaatgttccgtgcgctgggacgctacattcagggtctgaacggcagatatatcaccgctgaagatgtgggtacaaccgttgatgacatggacattatccatgaagaaactgacttcgtgaccgggatctcaccaagctttggctcttctggtaacccgtccccggttacggcatatggcgtataccgcggcatgaaagctgctgcgaaagaggccttcggtactgataacctcgaagggaaggtaattgcggttcagggtgtcggtaatgtggcttaccacctctgtaaacatctgcacgctgaaggcgctaagctgattgttaccgatatcaacaaagaggcagtccaaagggccgttgaggaatttggtgcgtcggcagtagaaccgaatgaaatctacggcgttgaatgcgacatttacgccccgtgtgcgctgggtgccacggtcaacgatgaaactatccctcagctgaaagctaaggttatcgctggcagcgccaacaaccagctgaaagaagaccgtcatggagatatcatacacgagatgggtatcgtgtatgcgccggattacgtgatcaacgcagggggcgttattaatgtggcggacgaattatacggctataaccgtgaacgcgctttgaaacgggttgaatctatttacgatactatcgcaaaagtaatcgaaatcagcaaacgtgatggtattgctacctatgtcgcagctgaccgcttggctgaagagcggatcgcatctttaaagaactcccgtagcacctatctgcgcaacggccacgatatcatatcgcgacgt

SEQ ID NO: 223 - DNA, 1098 bp, Artificial Sequence
  Synthetic polynucleotide
atgacactggagatctttgaataccttgaaaagtatgactacgagcaagtagtcttctgccaggataaagaaagtggcttgaaagcaattatagccatccacgacactacgctgggtcctgctttagggggcactcgcatgtggacctatgatagcgaagaagctgcgatcgaagatgctctacgtctggcgaaaggtatgacctacaaaaatgcagctgccggtctcaacctgggcggtgcgaagactgttattatcggcgacccccgaaaagacaaatccgaggcaatgttccgtgcgctgggacgctacattcagggtctgaacggcagatacatcaccgctgaagatgtgggtacaaccgttgatgacatggacattatccatgaagaaactgacttcgtgaccgggatctcaccaagctttggctcttctggtaacccgtccccggttacggcatatggcgtataccgcggcatgaaagctgctgcgaaagaggccttcggtactgataacctggaagggaaggtaattgcggttcagggtgtcggtaatgtggcttatcacctctgtaaacatctgcacgctgaaggcgctaagctgattgttaccgatatcaacaaagaggcagtccaaagggccgttgaggaatttggtgcgtcggcagtagaaccgaatgaaatctacggcgttgaatgcgacatttacgccccgtgtgcgctgggtgccacggtcaacgatgaaactatccctcagctgaaagctaaggttatcgctggcagcgccaacaaccagctgaaagaagaccgtcatggagatatcatacacgagatgggtatcgtgtatgcgccggattacgtgatcaacgcagggggcgctattaatgtggcggacgaattatacggctataaccgtgaacgcgctttgaaacgggttgaatctatttacgatactatcgcaaaagtaatcgaaatcagcaaacgtgatggtattgctacctacgtcgcagctgaccgcttggctgaagagcggatcgcatctttaaagaactcccgtagcacctatctgcgcaacggccacgatatcatatcgcgacgt

SEQ ID NO: 224 - DNA, 1098 bp, Artificial Sequence
  Synthetic polynucleotide
atgacactggagatctttgaataccttgaaaagtatgactacgagcaagtagtcttctgccaggataaagaaagtggcttgaaagcaattatagccatccacgacactacgctgggtcctgctttagggggcactcgcatgtggacctatgatagcgaagaagctgcgatcgaagatgctctacgtctggcgaaaggtatgacctacaaaaatgcagctgccggtctcaacctgggcggtgcgaagactgttattatcggcgacccccgaaaagacaaatccgaggcaatgttccgtgcgctgggacgctacattcagggtctgaacggcagatacatcaccgctgaagatgtgggtacaaccgttgatgacatggacattatccatgaagaaactgacttcgtgaccgggatctcaccaagctttggctcttctggtaacccgtccccggttacggcatatggcgtataccgcggcatgaaagctgctgcgaaagaggccttcggtactgataacctggaagggaaggtaattgcggttcagggtgtcggtaatgtggcttatcacctctgtaaacatctgcacgctgaaggcgctaagctgattgttaccgatatcaacaaagaggcagtccaaagggccgttgaggaatttggtgcgtcggcagtagaaccgaatgaaatctacggcgttgaatgcgacatttacgccccgtgtgcgctgggtgccacggtcaacgatgaaactatccctcagctgaaagctaaggttatcgctggcagcgccaacaaccagctgaaagaagaccgtcatggagatatcatacacgagatgggtatcgtgtatgcgccggattacgtgatcaacgcagggggcgttattaataaagcggacgaattatacggctataaccgtgaacgcgctttgaagcgggttgaatctatttacgatactatcgcaaaagtgatcgaaatcagcaaacgtgatggtattgctacctacgtagcagctgaccgcttggctgaagagcggatcgcatctttaaaaaactcccgtagcacctatctgcgcaacggccacgatatcatatcgcgacgt

SEQ ID NO: 225 - DNA, 1098 bp, Artificial Sequence
  Synthetic polynucleotide
atgacactggagatctttgaataccttgaaaagtatgactacgagcaagtagtcttctgccaggataaagaaagtggcttgaaagcaattatagccatccacgacactacgctgggtcctgctttagggggcactcgcatgtggacctatgatagcgaagaagctgcgatcgaagatgctctacgtctggcgaaaggtatgacctacaaaaatgcagctgccggtcgtaacctgggcggtgcgaagactgttattatcggcgaccccagaaaagacaaatccgaggcaatgttccgcgcgctgggacgttacattcagggtctgaacggcaggtacatcaccgctgaagatgtgggtacaaccgttgatgacatggacattatccatgaagaaactgacttcgtgaccgggatctcaccaagctttggctcttctggtaacccgtccccggttacggcatatggcgtataccgcggcatgaaagctgctgcgaaagaggccttcggtactgataacctcgaagggaaggtaattgcggttcagggtgtcggtaatgtggcttatcacctctgtaaacatctgcacgctgaaggcgctaagctgattgttaccgatatcaacaaagaggcagtccaacgggccgttgaggaatttggtgcgtcggcagtagaaccgaatgaaatctacggcgttgaatgcgacatttacgccccgtgtgcgctgggtgccacggtcaacgatgaaactatccctcagctgaaagctaaggttatcgctggcagcgccaacaaccagctgaaagaagaccgtcatggagatatcatacacgagatgggtatcgtgtatgcgccggattacgtgatcaacgcagggggcgttattaatgtggcggacgaattatacggctataaccgtgaacgcgctttgaaacgagttgaatctatttacgatactatcgcaaaagtaatcgaaatcagcaaacgtgatggtattgctacctacgtcgcagctgaccgcttggctgaagagcggatcgcatctttaaagaactcccgtagcacctatctgcgcaacggccacgatatcatatcgaggcgt

SEQ ID NO: 226 - DNA, 1092 bp, Artificial Sequence
  Synthetic polynucleotide
atggagctgttcaagtatatggaaaaatacgactacgaacaactcgtgttttgccaggatgaacagtcaggcttgaaagcaattatagccattcacgacaccactcttggtccagcgttagggggcacgcggatgtggacatatgagaatgaagaagctgctatcgaagatgcgctgcgtctggctcgtggtatgacttacaaaaacgcagctgccggtctgaacctgggcggtggcaaaaccgtcatcatcggagaccctcgcaaggataaaaacgaggaaatgttccgcgcattcggtagatacatccagggcctgaatggccgttacatcactgccgaagacgttggtaccaccgtagaagatatggacatcattcatgatgagactgactatgttaccggcatttctcccgcttttggtagctcgggtaacccgtccccggtgactgcgtatggtgtataccgtggcatgaaagcggcagctaaagcagcgttcgggactgactctctggaaggcaaaaccatcgctgttcaaggtgtaggcaacgttgcttacaacctgtgtcgacacttacatgaagagggtgctaacctgatcgtcactgatattaataagcagtccgttcagcgcgcagtggaggattttggcgcacgcgctgttgacccggacgatatctacagtcaggactgcgatatttacgccccgtgtgctcttggagccacgatcaacgatgacaccatcaaacagctgaaagcgaaagttatcgctggtgcggcaaacaaccaactgaaggaaacacgtcacggtgatcagatacacgaaatgggaatcgtgtatgcgccggattacgttatcaacgcaggcggtgtgatcaacgtagcagatgagctctatggctacaatgctgaacgtgcgttgaaaaaagtagaaggcatttatggtaacatcgaacgtgttcttgaaattagccagcgcgacggcatccctgcttacctggcggcagaccgtttagcagaagaacgtatagaacgtatgcgccgcagccgttctcagttcctgcaaaacggtcatagtgttctgtcccgccgg

SEQ ID NO: 227 - DNA, 1098 bp, Artificial Sequence
  Synthetic polynucleotide
atgacactggagatctttgaataccttgaaaagtatgactacgagcaagtagtcttctgccaggataaagaaagtggcttgaaagcaattatagccatccacgacactacgctgggtcctgctttagggggcactcgcatgtggacctatgatagcgaagaagctgcgatcgaagatgctctacgtctggcgaaaggtatgacctacaaaaatgcagctgccggtctcaacctgggcggtgcgaagactgttattatcggcgacccccgaaaagacaaatccgaggcaatgttccgtgcgctgggacgctacattcagggtctgaacggcagatacatcaccgctgaagatgtgggtacaaccgttgatgacatggacattatccatgaagaaactgacttcgtgaccgggatctcaccaagctttggctcttctggtaacccgtccccggttacggcatatggcgtataccgcggcatgaaagctgctgcgaaagaggccttcggtactgataacctggaagggaaggtaattgcggttcagggtgtcggtaatgtggcttatcacctctgtaaacatctgcacgctgaaggcgctaagctgattgttaccgatatcaacaaagaggcagtccaaagggccgttgaggaatttggtgcgtcggcagtagaaccgaatgaaatctacggcgttgaatgcgacatttacgccccgtgtgcgctgggtgccacggtcaacgatgaaactatccctcagctgaaagctaaggttatcgctggcagcgccaacaaccagctgaaagaagaccgtcatggagatatcatacacgagatgggtatcgtgtatgcgccggattacgtgatcaacgcagggggcgttattaatatcgcggacgaattatacggctataaccgtgaacgcgctttgaaacgggttgaatctatttacgatactatcgcaaaagtgatcgaaattagcaaacgtgatggtatcgctacctacgtagcagctgaccgcttggctgaagagcggatagcatctttaaagaactcccgtagcacctatctgcgcaacggccacgatatcatctcgcgacgt

SEQ ID NO: 228 - DNA, 1098 bp, Artificial Sequence
  Synthetic polynucleotide
atgacactggagatctttgaataccttgaaaagtatgactacgagcaagtagtcttctgccaggataaagaaagtggcttgaaagcaattatagccatccacgacactacgctgggtcctgctttagggggcactcgcatgtggacctatgatagcgaagaagctgcgatcgaagatgctctacgtctggcgaaaggtatgacctacaaaaatgcagctgccggtctcaacctgggcggtgcgaagactgttattatcggcgacccccgaaaagacaaatccgaggcaatgttccgtgcgctgggacgctacattcagggtctgaacggcagatacatcaccgctgaagatgtgggtacaaccgttgatgacatggacattatccatgaagaaactgacttcgtgaccgggatctcaccaagctttggctcttctggtaacccgtccccggttacggcatatggcgtataccgcggcatgaaagctgctgcgaaagaggccttcggtactgataacctggaagggaaggtaattgcggttcagggtgtcggtaatgtggcttatcacctctgtaaacatctgcacgctgaaggcgctaagctgattgttaccgatatcaacaaagaggcagtccaaagggccgttgaggaatttggtgcgtcggcagtagaaccgaatgaaatctacggcgttgaatgcgacatttacgccccgtgtgcgctgggtgccacggtcaacgatgaaactatccctcagctgaaagctaaggttatcgctggcagcgccaacaaccagctgaaagaagaccgtcatggagatatcatacacgagatgggtatcgtgtatgcgccggattacgtgatcaacgcagggggcgttattaatgtggcggacgaacgttacggctataaccgtgaacgcgctttaaaacgggttgaatctatttacgatactatcgcaaaagtaatcgaaatcagcaaacgtgatggtattgctacctacgtcgcagctgaccgcttggctgaagagcggatcgcatctttaaagaactcccgtagcacctatctgcgcaacggccacgatatcatatcgaggcgt

SEQ ID NO: 229 - DNA, 1089 bp, Artificial Sequence
  Synthetic polynucleotide
atgatcttcgagaagatggaacagtacgattatgaacaattagtgttttgccatgacaaaacgtccggccttaaagcaattatctgtattcacgactctacactcggtccggcgctgggtggctgccgcttctggaattacgaaaccgaagaggaagctatcgaagatgtaatgcgtttggccaaagggatgacttataaaaacgctgccgctggtctgaacctgggcggcgcaaagactgtcgttatgggtgaccccaaaaaagataagagcgaggcgtttttccgtgcgctgggacggtacataaacagtctggacgggcgctacatcaccgctgaagatgtaaacactaccgttgaggacatggatttcatctatcaggaaaccccgtacgtgactggtattagcgaatcttatggctcctctggtaatccatcaccgaaaaccgcactgggcgttttctacgctatgaaacgtactgcaaaagaagcatttggaacggatgacctggaaggcaaaacggttagcgttcagggtctgggcaacgtagcttacaccctatgcgagtatctccacgaggctggagcgaaactggtggtcactgatatcaacgacgaagctgtggaacgtgtggttaatgatttcaacgcggaaaaggttggtgtcgacgacatttactcggtagaggctgacatctttgccccgtgtgccctgggggccatcctcaacgatgacactatccctcaactgaaggttaaagctgtatgcggttcatctaacaaccagctgctggataccgaaaaacacggcaaaatgctggaagataaaggtatcgtttatgcgccggacttcgttgtgaacgctggtggtgtgatcaacgtcgctgacgagctgcaaggctacaatgaagacagggctattgcaaaagtgaaaggtatttacaatcagatggataaaatattcaacatcgctaaagaacaggatattctgcctgttagcgccgcagaacatctggcggaaaaacgtatcaaggatatgatggtcgttcactccaaattttctgctaagagcaacaaccagatcaatcgc

SEQ ID NO: 230 - DNA, 1098 bp, Artificial Sequence
  Synthetic polynucleotide
atgacactggagatctttgaataccttgaaaagtatgactacgagcaagtagtcttctgccaggataaagaaagtggcttgaaagcaattatagccatccacgacactacgctgggtcctgctttagggggcactcgcatgtggacctatgatagcgaagaagctgcgatcgaagatgctctacgtctggcgaaaggtatgacctacaaaaatgcagctgccggttctaacctgggcggtgcgaagactgttattatcggcgacccccgaaaagacaaatccgaggcaatgttccgtgcgctgggacgctacattcagggtctgaacggcagatacatcaccgctgaagatgtgggtacaaccgttgatgacatggacattatccatgaagaaactgacttcgtgaccgggatctcaccaagctttggctcttccggtaacccgtctccggttacggcatatggcgtataccgcggcatgaaagctgctgcgaaagaggccttcggtactgataacctcgaagggaaggtaattgcggttcagggtgtcggtaatgtggcttatcacctctgtaaacatctgcacgctgaaggcgctaagctgattgttaccgatatcaacaaagaggcagtccaaagggccgttgaggaatttggtgcgagcgcagtagaaccgaatgaaatctacggcgttgaatgcgacatttacgccccgtgtgcgctgggtgccacggtcaacgatgaaactatccctcagctgaaagctaaggttatcgctggctcggccaacaaccagctgaaagaagaccgtcatggagatatcatacacgagatgggtatcgtgtatgcgccggattacgtgatcaacgcagggggcgttattaatgtggcggacgaattatacggctataaccgtgaacgcgctttgaaacgggttgaatccatttacgatactatcgcaaaagtaatcgaaatcagcaaacgtgatggtattgctacctacgtcgcagctgaccgcttggctgaagagcggatcgcatctttaaagaactctcgtagcacctatctgcgcaacggccacgatatcatatcgcgacgt

SEQ ID NO: 231 - DNA, 1098 bp, Artificial Sequence
  Synthetic polynucleotide
atgacactggagatctttgaataccttgaaaagtatgactacgagcaagtagtcttctgccaggataaagaaagtggcttgaaagcaattatagccatccacgacactacgctgggtcctgctttagggggcactcgcatgtggacctatgatagcgaagaagctgcgatcgaagatgctctacgtctggcgaaaggtatgacctacaaaaatgcagctgccggtctcaacctgggcggtgcgaagactgttattatcggcgacccccgaaaagacaaatccgaggcaatgttccgtgcgctgggacgctacattcagggtctgaacggcagatactggaccgctgaagatgtgggtacaaccgttgatgacatggacatcatccatgaagaaactgacttcgtgaccgggatttcaccaagctttggctcttctggtaacccgtccccggttacggcatatggcgtataccgcggcatgaaagctgctgcgaaagaggccttcggtactgataacctggaagggaaggtaatcgcggttcagggtgtcggtaatgtggcttatcacctctgtaaacatctgcacgctgaaggcgctaagctgattgttaccgatatcaacaaagaggcagtccaaagggccgttgaggaatttggtgcgtcggcagtagaaccgaatgaaatctacggcgttgaatgcgacatttacgccccgtgtgcgctgggtgccacggtcaacgatgaaactatccctcagctgaaagctaaggttatcgctggcagcgccaacaaccagctgaaagaagaccgtcatggagatataatccacgagatgggtattgtgtatgcgccggattacgtgatcaacgcagggggcgttatcaatgtggcggacgaattatacggctataaccgtgaacgcgctttgaaacgggttgaatctatttacgatactattgcaaaagtaatcgaaatcagcaaacgtgatggtattgctacctacgtcgcagctgaccgcttggctgaagagcggatcgcatctttaaagaactcccgtagcacctatctgcgcaacggccacgatatcatatcgcgacgt

SEQ ID NO: 232 - DNA, 1098 bp, Artificial Sequence
  Synthetic polynucleotide
atgacactggagatctttgaataccttgaaaagtatgactacgagcaagtagtcttctgccaggataaagaaagtggcttgaaagcaattatagccatccacgacactacgctgggtcctgctttagggggcactcgcatgtggacctatgatagcgaagaagctgcgatcgaagatgctctacgtctggcgaaaggtatgacctacaaaaatgcagctgccggtctcaacctgggcggtgcgaagactgttattatcggcgacccccgaaaagacaaatccgaggcaatgttccgtgcgctgggacgctacattcagggtctgaacggcagatacatcaccaacgaagatgtgggtacaaccgttgatgacatggacattatccatgaagaaactgacttcgtgaccgggatctcaccaagctttggctcttctggtaatccgtccccggttacggcttatggcgtataccgcggcatgaaagctgctgcaaaagaggccttcggtactgataacctggaagggaaggtaattgcggttcagggtgtcggtaacgtggcttatcacctctgtaaacatctgcacgctgaaggcgctaagctgattgttaccgatatcaacaaagaggcggtccaaagggcagttgaggaatttggtgcgtcggcagtagaaccgaatgaaatctacggcgttgaatgcgacatttacgccccgtgtgcgctgggtgccacggtcaacgatgaaactatccctcagctgaaagccaaggttatcgctggcagcgcaaacaaccagctgaaagaagaccgtcatggagatatcatacacgagatgggtatcgtgtatgcgccggattacgtgatcaacgctgggggcgttattaatgtggcggacgaattatacggctataaccgtgaacgcgctttgaaacgggttgaatctatttacgatactatcgcaaaagtaatcgaaatcagcaaacgtgatggtattgctacctacgtcgcagctgaccgcttggctgaagagcggatcgcatctttaaagaactcccgtagcacctatctgcgcaatggccacgatatcatatcgcgacgt

SEQ ID NO: 233 - DNA, 1098 bp, Artificial Sequence
  Synthetic polynucleotide
atgacactggagatctttgaataccttgaaaagtatgactacgagcaagtagtcttctgccaggataaagaaagtggcttgaaagcaattatagccatccacgacactacgctgggtcctgctttagggggcactcgcatgtggacctatgatagcgaagaagctgcgatcgaagatgctctacgtctggcgaaaggtatgacctacaaaaatgcagctgccggtctcaacctgggcggtgcgaagactgttattatcggcgacccccgaaaagacaaatccgaggcaatgttccgtgcgctgggacgctacattcagggtctgaacggcagatacatcaccgctgaagatgtgggtacaaccgttgatgacatggacattatccatgaagaaactgacttcgtgaccgggatctcaccaagctttggctcttctggtaacccgtccccggttacggcatatggcgtataccgcggcatgaaagctgctgcgaaagaggccttcggtactgataacctggaagggaaggtaattgcggttcagggtgtcggtaatgtggcttatcacctctgtaaacatctgcacgctgaaggcgctaagctgattgttaccgatatcaacaaagaggcagtccaaagggccgttgaggaatttggtgcgtcggcagtagaaccgaatgaaatctacggcgttgaatgcgacatttacgccccgtgtgcgctgggtgccacggtcaacgatgaaactatccctcagctgaaagctaaggttatcgctggcagcgccaacaaccagctgaaagaagaccgtcatggagatatcatacacgagatgggtatcgtgtatgcgccggattacgtgatcaacgcagggggcgttattaatagtgcggacgaattatacggctataaccgtgaacgcgctttgaaacgggttgaatctatttacgatactatcgcaaaagtgatcgaaatcagcaaacgtgatggtattgctacctacgtagcagctgaccgcttggctgaagagcggatcgcatctttaaagaactcccgtagcacctatctgcgcaacggccacgatatcatatcccgacgt

SEQ ID NO: 234 - DNA, 1098 bp, Artificial Sequence
  Synthetic polynucleotide
atgacactggagatctttgaataccttgaaaagtatgactacgagcaagtagtcttctgccaggataaagaaagtggcttgaaagcaattatagccatccacgacactacgctgggtcctgctttagggggcactcgcatgtggacctatgatagcgaagaagctgcgatcgaagatgctctacgtctggcgaaaggtatgacctacaaaaatgcagctgccggtctcaacctgggcggtgcgaagactgttattatcggcgacccccgaaaagacaaatccgaggcaatgttccgtgcgctgggacgctacattcagggtctgaacggcagatacatcaccgctatggatgtgggtacaaccgttgatgacatggacattatccatgaagaaactgacttcgtgaccgggatctcaccaagctttggctcttctggtaacccgtccccggttacggcatatggcgtataccgcggcatgaaagctgctgcgaaagaagccttcggtactgataacctggaggggaaggtaattgcggttcagggtgtcggtaatgtggcttatcacctctgtaaacatctgcacgctgaaggcgctaagctgattgttaccgatatcaacaaagaagcagtccaaagggccgttgaggaatttggtgcgtcggcagtagagccgaatgaaatctacggcgttgaatgcgacatttacgccccgtgtgcgctgggtgccacggtcaacgatgaaactatccctcagctgaaagctaaggttatcgctggcagcgccaacaaccagctgaaagaagaccgtcatggagatatcatacacgaaatgggtatcgtgtatgcgccggattacgtgatcaacgcagggggcgttattaatgtggcggacgagttatacggctataaccgtgaacgcgctttgaaacgggttgaatctatttacgatactatcgcaaaagtaatcgaaatcagcaaacgtgatggtattgctacctacgtcgcagctgaccgcttggctgaagagcggatcgcatctttaaagaactcccgtagcacctatctgcgcaacggccacgatatcatatcgcgacgt

SEQ ID NO: 235 - DNA, 1098 bp, Artificial Sequence
  Synthetic polynucleotide
atgacactggagatctttgaataccttgaaaagtatgactacgagcaagtagtcttctgccaggataaagaaagtggcttgaaagcaattatagccatccacgacactacgctgggtcctgctgctgggggcactcgcatgtggacctatgatagcgaagaagcggctatcgaagatgcactccgtctggcgaaaggtatgacctacaaaaatgctgccgccggtttaaacctgggcggtgcgaagactgttattatcggcgacccccgaaaagacaaatccgaggcaatgttccgtgcgctgggacgctacattcagggtctgaacggcagatacatcaccgctgaagatgtgggtacaaccgttgatgacatggacattatccatgaagaaactgacttcgtgaccgggatctcaccaagctttggctcttctggtaacccgtccccggttacggcttatggcgtataccgcggcatgaaagctgctgcaaaagaggcattcggtactgataacctagaagggaaggtaattgcggttcagggtgtcggtaatgtggcttatcacctctgtaaacatctgcacgccgaaggcgctaagctgattgttaccgatatcaacaaagaggcggtccaaagggccgttgaggaatttggtgcgtcggcagtagaaccgaatgaaatctacggcgttgaatgcgacatttacgccccgtgtgcgctgggtgctacggtcaacgatgaaactatccctcagctgaaagcaaaggttatcgctggcagcgccaacaaccagctgaaagaagaccgtcatggagatatcatacacgagatgggtatcgtgtatgcgccggattacgtgatcaacgctgggggcgttattaatgtggcggacgaattatacggctataaccgtgaacgcgctttgaaacgggttgaatctatttacgatactatcgcaaaagtaatcgaaatcagcaaacgtgatggtattgctacctacgtcgcagctgaccgcttggctgaagagcggatcgcatctttaaagaactcccgtagcacctatctgcgcaacggccacgatatcatatcgcgacgt

SEQ ID NO: 236 - DNA, 1098 bp, Artificial Sequence
  Synthetic polynucleotide
atgacactggagatctttgaataccttgaaaagtatgactacgagcaagtagtcttctgccaggataaagaaagtggcttgaaagcaattatagccatccacgacactacgctgggtcctgctttagggggcactcgcatgtggacctatgatagcgaagaagctgcgatcgaagatgctctacgtctggcgaaaggtatgacctacaaaaatgcagctgccggtctcaacctgggcggtgcgaagactgttattatcggcgacccccgaaaagacaaatccgaggcaatgttccgtgcgctgggacgctacattcagggtctgaacggcagatacatcaccgctgaagatgtgggtacaaccgttgatgacatggacattatccatgaagaaactgacttcgtgaccgggatctcaccaagctttggctcttctggtaacccgtccccggttacggcatatggcgtataccgcggcatgaaagctgctgcgaaagaggccttcggtactgataacctggaagggaaggtaattgcggttcagggtgtcggtaatgtggcttatcacctctgtaaacatctgcacgctgaaggcgctaagctgattgttaccgatatcaacaaagaggcagtccaaagggccgttgaggaatttggtgcgtcggcagtagaaccgaatgaaatctacggcgttgaatgcgacatttacgccccgtgtgcgctgggtgccacggtcaacgatgaaactatccctcagctgaaagctaaggttatcgctggcagcgccaacaaccagctgaaagaagaccgtcatggagatatcatacacgagatgggtatcgtgtatgcgccggattacgtgatcaacgcagggggctgcattaatgtggcggacgaattatacggctataaccgtgaacgcgctttgaaacgggttgaatctatttacgatactatcgcaaaagtaatcgaaatcagcaaacgtgatggtattgctacctacgtcgcagctgaccgcttggctgaagagcggatcgcatctttaaagaactcccgtagcacctatctgcgcaacggccacgatatcatatcgcgacgt

SEQ ID NO: 237 - DNA, 1098 bp, Artificial Sequence
  Synthetic polynucleotide
atgacactggagatctttgaataccttgaaaagtatgactacgagcaagtagtcttctgccaggataaagaaagtggcttgaaagcaattatagccatccacgacactacgctgggtcctgctttagggggcactcgcatgtggacctatgatagcgaagaagctgcgatcgaagatgctctacgtctggcgaaaggtatgacctacaaaatggcagctgccggtctcaacctgggcggtgcgaagactgttattatcggcgacccccgaaaagacaaatccgaggcaatgttccgtgcgctgggacgctacattcagggtctgaatggcagatacatcaccgctgaagatgtgggtacaaccgttgatgacatggacattatccatgaagaaactgacttcgtgaccgggatctcaccaagctttggctcttctggtaacccgtccccggttacggcatatggcgtataccgcggcatgaaagctgctgcgaaagaggccttcggtactgataacctggaagggaaggtaattgcggttcagggtgtcggtaatgtggcttatcacctctgtaaacatctgcacgctgaaggcgctaagctgattgttaccgatatcaacaaagaggcagtccaaagggccgttgaggaatttggtgcgtcggcagtagaaccgaacgaaatctacggcgttgaatgcgacatttacgccccgtgtgcgctgggtgccacggtcaacgatgaaactatccctcagctgaaagctaaggttatcgctggcagcgccaacaatcagctgaaagaagaccgtcatggagatatcatacacgagatgggtatcgtgtatgcgccggattacgtgatcaacgcagggggcgttattaacgtggcggacgaattatacggctataaccgtgaacgcgctttgaaacgggttgaatctatttacgatactatcgcaaaagtaatcgaaatcagcaaacgtgatggtattgctacctacgtcgcagctgaccgcttggctgaagagcggatcgcatctttaaagaactcccgtagcacctatctgcgcaatggccacgatatcatatcgcgacgt

SEQ ID NO: 238 - DNA, 1098 bp, Artificial Sequence
  Synthetic polynucleotide
atgacactggagatctttgaataccttgaaaagtatgactacgagcaagtagtcttctgccaggataaagaaagtggcttgaaagcaattatagccatccacgacactacgctgggtcctgctttagggggcactcgcatgtggacctatgatagcgaagaagctgcgatcgaagatgctctacgtctggcgaaaggtatgacctacaaaaatgcagctgccggtctcaacctgggcggtgcgaagactgttattatcggcgacccccgaaaagacaaatccgaggcaatgttccgtgcgctgggacgctacattcagggtctgaacggcagatacatcaccgctgaagatgtgggtacaaccgttgatgacatggacattatccatgaagaaactgacttcgtgaccgggatctcaccaagctttggctcttctggtaacccgtccccggttacggcatatggcgtataccgcggcatgaaagctgctgcgaaagaggccttcggtactgataacctggaagggaaggtaattgcggttcagggtgtcggtaatgtggcttatcacctctgtaaacatctgcacgctgaaggcgctaagctgattgttaccgatatcaacaaagaggcagtccaaagggccgttgaggaatttggtgcgtcggcagtagaaccgaatgaaatctacggcgttgaatgcgacatttacgccccgtgtgcgctgggtgccacggtcaacgatgaaactatccctcagctgaaagctaaggttatcgctggcagcgccaacaaccagctgaaagaagaccgtcatggagatatcatacacgagatgggtatcgtgtatgcgccggattacgtgatcaacgcagggggcgttattaatgcggcagacgaattatacggctataaccgtgaacgcgctttgaaacgggttgaatctatttacgatactatcgcaaaagtgatcgaaatcagcaaacgtgatggtattgctacctacgtagcagctgaccgcttggctgaagagcggatcgcctctttaaagaactcccgtagcacctatctgcgcaacggccacgatatcatatcgcgacgt

SEQ ID NO: 239 - DNA, 1098 bp, Artificial Sequence
  Synthetic polynucleotide
atgacactggagatctttgaataccttgaaaagtatgactacgagcaagtagtcttctgccaggataaagaaagtggcttgaaagcaattatagccatccacgacactacgctgggtcctgctttatgggggactcgcatgtggacctatgatagcgaagaagctgcgatcgaagatgctctacgtctggcgaaaggtatgacctacaaaaatgcagctgccggcctcaacctgggtggcgcgaagactgttattatcggtgacccccgaaaagacaaatccgaggcaatgttccgtgcgctgggacgctacattcagggcctgaacggtagatacatcaccgctgaagatgtgggtacaaccgttgatgacatggacattatccatgaagaaactgacttcgtgaccgggatctcaccaagctttggctcttctggtaacccgtccccggttacggcatatggcgtataccgcggcatgaaagctgctgcgaaagaggccttcggtactgataacctggaaggaaaggtaattgcggttcagggtgtcggtaatgtggcttatcacctctgtaaacatctgcacgctgaaggcgctaagctgattgttaccgatatcaacaaagaggcagtccaaagggccgttgaggaatttggcgcgtcggcagtagaaccgaatgaaatctacggtgttgaatgcgacatttacgccccgtgtgcgctgggcgccacggtcaacgatgaaactatccctcagctgaaagctaaggttatcgctggaagcgccaacaaccagctgaaagaagaccgtcatggggatatcatacacgagatgggtatcgtgtatgcgccggattacgtgatcaacgcagggggtgttattaatgtggcggacgaattatacggctataaccgtgaacgcgctttgaaacgggttgaatctatttacgatactatcgcaaaagtaatcgaaatcagcaaacgtgatggtattgctacctacgtcgcagctgaccgcttggctgaagagcggatcgcatctttaaagaactcccgtagcacctatctgcgcaacggccacgatatcatatcgcgacgt

SEQ ID NO: 240 - DNA, 1098 bp, Artificial Sequence
  Synthetic polynucleotide
atgacactggagatctttgaataccttgaaaagtatgactacgagcaagtagtcttctgccaggataaagaaagtggcttgaaagcaattatagccatccacgacactacgctgggtcctgctttagggggcactcgcatgtggacctatgatagcgaagaagctgcgatcgaagatgctctacgtctggcgaaaggtatgacctacaaaaatgcagctgccggtctcaacctgggcggtgcgaagactgttattatcggcgacccccgaaaagacaaatccgaggcaatgttccgtgcgctgggacgctacattcagggtctgaacggcagatacatcaccgctgaagatgtgggtacaaccgttgatgacatggacattatccatgaagaaactgacttcgtgaccgggatctcaccaagctttggctcttctggtaacccgtccccggttacggcatatggcgtataccgcggcatgaaagctgctgcgaaagaggccttcggtactgataacctggaagggaaggtaattgcggttcagggtgtcggtaatgtggcttatcacctctgtaaacatctgcacgctgaaggcgctaagctgattgttaccgatatcaacaaagaggcagtccaaagggccgttgaggaatttggtgcgtcggcagtagaaccgaatgaaatctacggcgttgaatgcgacatttacgccccgtgtgcgctgggtgccacggtcaacgatgaaactatccctcagctgaaagctaaggttatcgctggcagcgccaacaaccagctgaaagaagaccgtcatggagatatcatacacgagatgggtatcgtgtatgcgccggattacgtgatcaacgcagggggcgttattaatgtgcaggacgaattatacggctataaccgtgaacgcgctttgaaacgggttgaatctatttacgatactatcgcaaaagtaatcgaaatcagcaaacgtgatggtattgctacctacgtcgcggctgaccgcttggctgaagagcggatcgcatctttaaagaactcccgtagcacctatctgcgcaacggccacgatatcatatcgcgacgt

SEQ ID NO: 241 - DNA, 1098 bp, Artificial Sequence
  Synthetic polynucleotide
atgacactggagatctttgaataccttgaaaagtatgactacgagcaagtagtcttctgccaggataaagaaagtggcttgaaagcaattatagccatccacgacactacgctgggtcctgctttagggggcactcgcatgtggacctatgatagcgaagaagctgcgatcgaagatgctctacgtctggcgaaaggtatgacctacaaaaatgcagctgccggtctcaacctgggcggtgcgaagactgttattatcggcgacccccgaaaagacaaatccgaggcaatgttccgtgcgctgggacgctacattcagggtctgaacggcagatacatcaccgctgaagatgtgggtacaaccgttgatgacatggacattatccatgaagaaactgacttcgtgaccgggatctcaccaagctttggctcttctggtaacccgtccccggttacggcatatggcgtataccgcggcatgaaagctgctgcgaaagaggccttcggtactgataacctggaagggaaggtaattgcggttcagggtgtcggtaatgtggcttatcacctctgtaaacatctgcacgctgaaggcgctaagctgattgttaccgatatcaacaaagaggcagtccaaagggccgttgaggaatttggtgcgtcggcagtagaaccgaatgaaatctacggcgttgaatgcgacatttacgccccgtgtgcgctgggtgccacggtcaacgatgaaactatccctcagctgaaagctaaggttatcgctggcagcgccaacaaccagctgaaagaagaccgtcatggagatatcatacacgagatgggtatcgtgtatgcgccggattacgtgatcaacgcagggggcaccattaatgtggcggacgaattatacggctataaccgtgaacgcgctttgaaacgggttgaatctatttacgatactatcgcaaaagtaatcgaaatcagcaaacgtgatggtattgctacctacgtcgcagctgaccgcttggctgaagagcggatcgcatctttaaagaactcccgtagcacctatctgcgcaacggccacgatatcatatcgcgacgt

SEQ ID NO: 242 - DNA, 1098 bp, Artificial Sequence
  Synthetic polynucleotide
atgacactggagatctttgaataccttgaaaagtatgactacgagcaagtagtcttctgccaggataaagaaagtggcttgaaagcaattatagccatccacgacactacgctgggtcctgctttagggggcactcgcatgtggacctatgatagcgaagaagctgcgatcgaagatgctctacgtctggcgaaaggtatgacctacaaaaatgcagctgccggtctcaacctgggcggtgcgaagactgttattatcggcgacccccgaaaagacaaatccgaggcaatgttccgtgcgctgggacgctacattcagggtctgaacggcagatactataccgctgaagatgtgggtacaaccgttgatgacatggacatcatccatgaagaaactgacttcgtgaccgggatttcaccaagctttggctcttctggtaacccgtccccggttacggcatatggcgtataccgcggcatgaaagctgctgcgaaagaggccttcggtactgataacctggaagggaaggtaatcgcggttcagggtgtcggtaatgtggcttaccacctctgtaaacatctgcacgctgaaggcgctaagctgattgttaccgatatcaacaaagaggcagtccaaagggccgttgaggaatttggtgcgtcggcagtagaaccgaatgaaatctacggcgttgaatgcgacatttacgccccgtgtgcgctgggtgccacggtcaacgatgaaactatccctcagctgaaagctaaggttatcgctggcagcgccaacaaccagctgaaagaagaccgtcatggagatataatccacgagatgggtattgtgtatgcgccggattacgtgatcaacgcagggggcgttatcaatgtggcggacgaattatacggctataaccgtgaacgcgctttgaaacgggttgaatctatttacgatactattgcaaaagtaatcgaaatcagcaaacgtgatggtattgctacctatgtcgcagctgaccgcttggctgaagagcggatcgcatctttaaagaactcccgtagcacctatctgcgcaacggccacgatatcatatcgcgacgt

SEQ ID NO: 243 - DNA, 1098 bp, Artificial Sequence
  Synthetic polynucleotide
atgacactggagatctttgaataccttgaaaagtatgactacgagcaagtagtcttctgccaggataaagaaagtggcttgaaagcaattatagccatccacgacactacgctgggtcctgctttagggggcactcgcatgtggacctatgatagcgaagaagctgcgatcgaagatgctctacgtctggcgaaaggtatgacctacaaaaatgcagctgccggtattaacctgggcggtgcgaagactgttatcatcggcgacccccgaaaagacaaatccgaggcaatgttccgtgcgctgggacgctacattcagggtctgaacggcagatacatcaccgctgaagatgtgggtacaaccgttgatgacatggacattatccatgaagaaactgacttcgtgaccgggatctcaccaagctttggctcttctggtaacccgtccccggttacggcatatggcgtataccgcggcatgaaagctgctgcgaaagaggccttcggtactgataacctcgaagggaaggtaattgcggttcagggtgtcggtaatgtggcttatcacctctgtaaacatctgcacgctgaaggcgctaagctgattgttaccgatatcaacaaagaggcagtccaaagggccgttgaggaatttggtgcgtcggcagtagaaccgaatgaaatctacggcgttgaatgcgacatttacgccccgtgtgcgctgggtgccacggtcaacgatgaaactatccctcagctgaaagctaaggttatcgctggcagcgccaacaaccagctgaaagaagaccgtcatggagatataatccacgagatgggtatcgtgtatgcgccggattacgtgatcaacgcagggggcgttattaatgtggcggacgaattatacggctataaccgtgaacgcgctttgaaacgggttgaatctatttacgatactatcgcaaaagtaatcgaaattagcaaacgtgatggtatcgctacctacgtcgcagctgaccgcttggctgaagagcggatagcatctttaaagaactcccgtagcacctatctgcgcaacggccacgatatcatctcgcgacgt

SEQ ID NO: 244 - DNA, 1098 bp, Artificial Sequence
  Synthetic polynucleotide
atgacactggagatctttgaataccttgaaaagtatgactacgagcaagtagtcttctgccaggataaagaaagtggcttgaaagcaattatagccatccacgacactacgctgggtcctgctttagggcatactcgcatgtggacctatgatagcgaagaagctgcgatcgaagatgctctacgtctggcgaaaggtatgacctacaaaaatgcagctgccggcctcaacctgggtggcgcgaagactgttattatcggtgacccccgaaaagacaaatccgaggcaatgttccgtgcgctgggacgctacattcagggcctgaacggtagatacatcaccgctgaagatgtgggtacaaccgttgatgacatggacattatccacgaagaaactgacttcgtgaccgggatctcaccaagctttggctcttctggtaacccgtccccggttacggcatatggcgtataccgcggcatgaaagctgctgcgaaagaggccttcggtactgataacctggaaggaaaggtaattgcggttcagggtgtcggtaatgtggcttatcatctctgtaaacacctgcatgctgaaggcgctaagctgattgttaccgatatcaacaaagaggcagtccaaagggccgttgaggaatttggcgcgtcggcagtagaaccgaatgaaatctacggtgttgaatgcgacatttacgccccgtgtgcgctgggcgccacggtcaacgatgaaactatccctcagctgaaagctaaggttatcgctggaagcgccaacaaccagctgaaagaagaccgtcacggggatatcatacacgagatgggtatcgtgtatgcgccggattacgtgatcaacgcagggggtgttattaatgtggcggacgaattatacggctataaccgtgaacgcgctttgaaacgggttgaatctatttacgatactatcgcaaaagtaatcgaaatcagcaaacgtgatggtattgctacctacgtcgcagctgaccgcttggctgaagagcggatcgcatctttaaagaactcccgtagcacctatctgcgcaacggccatgatatcatatcgcgacgt

SEQ ID NO: 245 - DNA, 1098 bp, Artificial Sequence
  Synthetic polynucleotide
atgacactggagatctttgaataccttgaaaagtatgactacgagcaagtagtcttctgccaggataaagaaagtggcttgaaagcaattatagccatccacgacactacgctgggtcctgctttagggggcactcgcatgtggacctatgatagcgaagaagctgcgatcgaagatgctctacgtctggcgaaaggtatgacctacaaaaatgcagctgccggtaaaaacctgggcggtgcgaagactgttattatcggcgacccccgaaaagacaagtccgaggcaatgttccgtgcgctgggacgctacattcagggtctgaacggcagatacatcaccgctgaagatgtgggtacaaccgttgatgacatggacattatccatgaagaaactgacttcgtgaccgggatctcaccaagctttggctcttctggtaacccgtccccggttacggcatatggcgtataccgcggcatgaaagctgctgcgaaagaggccttcggtactgataacctcgaagggaaagtaattgcggttcagggtgtcggtaatgtggcttatcacctctgtaaacatctgcacgctgaaggcgctaagctgattgttaccgatatcaacaaagaggcagtccaaagggccgttgaggaatttggtgcgtcggcagtagaaccgaatgaaatctacggcgttgaatgcgacatttacgccccgtgtgcgctgggtgccacggtcaacgatgaaactatccctcagctgaaagctaaggttatcgctggcagcgccaacaaccagctgaaagaagaccgtcatggagatatcatacacgagatgggtatcgtgtatgcgccggattacgtgatcaacgcagggggcgttattaatgtggcggacgaattatacggctataaccgtgaacgcgctttgaagcgggttgaatctatttacgatactatcgcaaaagtaatcgaaatcagcaaacgtgatggtattgctacctacgtcgcagctgaccgcttggctgaagagcggatcgcatctttaaaaaactcccgtagcacctatctgcgcaacggccacgatatcatatcgcgacgt

SEQ ID NO: 246 - DNA, 1098 bp, Artificial Sequence
  Synthetic polynucleotide
atgacactggagatctttgaataccttgaaaagtatgactacgagcaagtagtcttctgccaggataaagaaagtggcttgaaagcaattatagccatccacgacactacgctgggtcctgctttatatgggactcgcatgtggacctacgatagcgaagaagctgcgatcgaagatgctctacgtctggcgaaaggtatgacctacaaaaatgcagctgccggcctcaacctgggtggcgcgaagactgttattatcggtgacccccgaaaagacaaatccgaggcaatgttccgtgcgctgggacgctacattcagggcctgaacggtagatatatcaccgctgaagatgtgggtacaaccgttgatgacatggacattatccatgaagaaactgacttcgtgaccgggatctcaccaagctttggctcttctggtaacccgtccccggttacggcatatggcgtataccgcggcatgaaagctgctgcgaaagaggccttcggtactgataacctggaaggaaaggtaattgcggttcagggtgtcggtaatgtggcttaccacctctgtaaacatctgcacgctgaaggcgctaagctgattgttaccgatatcaacaaagaggcagtccaaagggccgttgaggaatttggcgcgtcggcagtagaaccgaatgaaatctacggtgttgaatgcgacatttacgccccgtgtgcgctgggcgccacggtcaacgatgaaactatccctcagctgaaagctaaggttatcgctggaagcgccaacaaccagctgaaagaagaccgtcatggggatatcatacacgagatgggtatcgtgtatgcgccggattacgtgatcaacgcagggggtgttattaatgtggcggacgaattatacggctataaccgtgaacgcgctttgaaacgggttgaatctatttacgatactatcgcaaaagtaatcgaaatcagcaaacgtgatggtattgctacctatgtcgcagctgaccgcttggctgaagagcggatcgcatctttaaagaactcccgtagcacctatctgcgcaacggccacgatatcatatcgcgacgt

SEQ ID NO: 247 - DNA, 1098 bp, Artificial Sequence
  Synthetic polynucleotide
atgacactggagatctttgaataccttgaaaagtatgactacgagcaagtagtcttctgccaggataaagaaagtggcttgaaagcaattatagccatccacgacactacgctgggtcctgctttagggggcactcgcatgtggacctatgatagcgaagaagctgcgatcgaagatgctctacgtctggcgaaaggtatgacctacaaagacgcagctgccggtctcaacctgggcggtgcgaagactgttattatcggcgatccccgaaaagacaaatccgaggcaatgttccgtgcgctgggacgctacattcagggtctgaatggcagatacatcaccgctgaagatgtgggtacaaccgttgacgacatggatattatccatgaagaaactgacttcgtgaccgggatctcaccaagctttggctcttctggtaacccgtccccggttacggcatatggcgtataccgcggcatgaaagctgctgcgaaagaggccttcggtactgacaacctggaagggaaggtaattgcggttcagggtgtcggtaatgtggcttatcacctctgtaaacatctgcacgctgaaggcgctaagctgattgttaccgatatcaacaaagaggcagtccaaagggccgttgaggaatttggtgcgtcggcagtagaaccgaacgaaatctacggcgttgaatgcgacatttacgccccgtgtgcgctgggtgccacggtcaacgatgaaactatccctcagctgaaagctaaggttatcgctggcagcgccaacaatcagctgaaagaagaccgtcatggagatatcatacacgagatgggtatcgtgtatgcgccggattacgtgatcaacgcagggggcgttattaacgtggcggacgaattatacggctataaccgtgaacgcgctttgaaacgggttgaatctatttacgatactatcgcaaaagtaatcgaaatcagcaaacgtgatggtattgctacctacgtcgcagctgatcgcttggctgaagagcggatcgcatctttaaagaactcccgtagcacctatctgcgcaatggccacgacatcatatcgcgacgt

SEQ ID NO: 248 - DNA, 1098 bp, Artificial Sequence
  Synthetic polynucleotide
atgacactggagatctttgaataccttgaaaagtatgactacgagcaagtagtcttctgccaggataaagaaagtggcttgaaagcaattatagccatccacgacactacgctgggtcctgctttagggggcactcgcatgtggacctatgatagcgaagaagctgcgatcgaagatgctctacgtctggcgaaaggtatgacctacaaaaatgcagctgccggtctcaacctgggcggtgcgaagactgttattatcggcgacccccgaaaagacaaatccgaggcaatgttccgtgcgctgggacgctacattcagggtctgaacggcagataccagaccgctgaagatgtgggtacaaccgttgatgacatggacatcatccatgaagaaactgacttcgtgaccgggatttcaccaagctttggctcttctggtaacccgtccccggttacggcatatggcgtataccgcggcatgaaagctgctgcgaaagaggccttcggtactgataacctggaagggaaggtaatcgcggttcagggtgtcggtaatgtggcttatcacctctgtaaacatctgcacgctgaaggcgctaagctgattgttaccgatatcaacaaagaggcagtccaaagggccgttgaggaatttggtgcgtcggcagtagaaccgaatgaaatctacggcgttgaatgcgacatttacgccccgtgtgcgctgggtgccacggtcaacgatgaaactatccctcagctgaaagctaaggttatcgctggcagcgccaacaaccagctgaaagaagaccgtcatggagatataatccacgagatgggtattgtgtatgcgccggattacgtgatcaacgcagggggcgttatcaatgtggcggacgaattatacggctataaccgtgaacgcgctttgaaacgggttgaatctatttacgatactattgcaaaagtaatcgaaatcagcaaacgtgatggtattgctacctacgtcgcagctgaccgcttggctgaagagcggatcgcatctttaaagaactcccgtagcacctatctgcgcaacggccacgatatcatatcgcgacgt

SEQ ID NO: 249 - DNA, 1098 bp, Artificial Sequence
  Synthetic polynucleotide
atgacactggagatctttgaataccttgaaaagtatgactacgagcaagtagtcttctgccaggataaagaaagtggcttgaaagcaattatagccatccacgacactacgctgggtcctgctttagggggcactcgcatgtggacctatgatagcgaagaagctgcgatcgaagatgctctacgtctggcgaaaggtgcaacctacaaaaatgctgccgccggtctcaacctgggcggtgcgaagactgttattatcggcgacccccgaaaagacaaatccgaggcaatgttccgtgcgctgggacgctacattcagggtctgaacggcagatacatcaccgctgaagatgtgggtacaaccgttgatgacatggacattatccatgaagaaactgacttcgtgaccgggatctcaccaagctttggctcttctggtaacccgtccccggttacggcttatggcgtataccgcggcatgaaagctgctgcaaaagaggcattcggtactgataacctggaagggaaggtaattgcggttcagggtgtcggtaatgtggcttatcacctctgtaaacatctgcacgccgaaggcgctaagctgattgttaccgatatcaacaaagaggcggtccaaagggccgttgaggaatttggtgcgtcggcagtagaaccgaatgaaatctacggcgttgaatgcgacatttacgccccgtgtgcgctgggtgctacggtcaacgatgaaactatccctcagctgaaagcaaaggttatcgctggcagcgccaacaaccagctgaaagaagaccgtcatggagatatcatacacgagatgggtatcgtgtatgcgccggattacgtgatcaacgctgggggcgttattaatgtggcggacgaattatacggctataaccgtgaacgcgctttgaaacgggttgaatctatttacgatactatcgcaaaagtaatcgaaatcagcaaacgtgatggtattgctacctacgtcgcagctgaccgcttggctgaagagcggatcgcatctttaaagaactcccgtagcacctatctgcgcaacggccacgatatcatatcgcgacgt

SEQ ID NO: 250 - DNA, 1098 bp, Artificial Sequence
  Synthetic polynucleotide
atgacactggagatctttgaataccttgaaaagtatgactacgagcaagtagtcttctgccaggataaagaaagtggcttgaaagcaattatagccatccacgacactacgctgggtcctgctttagggggcactcgcatgtggacctatgatagcgaagaagctgcgatcgaagatgctctacgtctggcgaaaggtatgacctacaaaaatgcagctgccggtctcaacctgggcggtgcgaagactgttattatcggcgacccccgaaaagacaaatccgaggcaatgttccgtgcgctgggacgctacattcagggtctgaacggcagatacatcaccgctgaagatgtgggtacaaccgttgatgacatggacattatccatgaagaaactgacttcgtgaccgggatctcaccaagctttggctcttctggtaacccgtccccggttacggcatatggcgtataccgcggcatgaaagctgctgcgaaagaggccttcggtactgataacctggaagggaaggtaattgcggttcagggtgtcggtaatgtggcttatcacctctgtaaacatctgcacgctgaaggcgctaagctgattgttaccgatatcaacaaagaggcagtccaaagggccgttgaggaatttggtgcgtcggcagtagaaccgaatgaaatctacggcgttgaatgcgacatttacgccccgtgtgcgctgggtgccacggtcaacgatgaaactatccctcagctgaaagctaaggttatcgctggcagcgccaacaaccagctgaaagaagaccgtcatggagatatcatacacgagatgggtatcgtgtatgcgccggattacgtgatcaacgcagggggcgttattaataccgcggacgaattatacggctataaccgtgaacgcgctttgaaacgggttgaatctatttacgatactatcgcaaaagtgatcgaaatcagcaaacgtgatggtattgctacctacgtagcagctgaccgcttggctgaagagcggatcgcatctttaaagaactcccgtagcacctatctgcgcaacggccacgatatcatatcgcgacgt

SEQ ID NO: 251 - DNA, 1098 bp, Artificial Sequence
  Synthetic polynucleotide
atgacactggagatctttgaataccttgaaaagtatgactacgagcaagtagtcttctgccaggataaagaaagtggcttgaaagcaattatagccatccacgacactacgctgggtcctgctttagggggcactcgcatgtggacctatgatagcgaagaagctgcgatcgaagatgctctacgtctggcgaaaggtatgacctacaaaaatgcagctgccggtactaacctgggcggtgcgaagaccgttattatcggcgacccccgaaaagacaaatccgaggcaatgttccgtgcgctgggacgctacattcagggtctgaacggcagatacatcaccgctgaagatgtgggtacgactgttgatgacatggacattatccatgaagaaaccgacttcgtgactgggatctcaccaagctttggctcttctggtaacccgtccccggttacggcatatggcgtataccgcggcatgaaagctgctgcgaaagaggccttcggtaccgataacctcgaagggaaggtaattgcggttcagggtgtcggtaatgtggcttatcacctctgtaaacatctgcacgctgaaggcgctaagctgattgttactgatatcaacaaagaggcagtccaaagggccgttgaggaatttggtgcgtcggcagtagaaccgaatgaaatctacggcgttgaatgcgacatttacgccccgtgtgcgctgggtgccacagtcaacgatgaaactatccctcagctgaaagctaaggttatcgctggcagcgccaacaaccagctgaaagaagaccgtcatggagatatcatacacgagatgggtatcgtgtatgcgccggattacgtgatcaacgcagggggcgttattaatgtggcggacgaattatacggctataaccgtgaacgcgctttgaaacgggttgaatctatttacgatactatcgcaaaagtaatcgaaatcagcaaacgtgatggtattgctacctacgtcgcagctgaccgcttggctgaagagcggatcgcatctttaaagaactcccgtagcacctatctgcgcaacggccacgatatcatatcgcgacgt

SEQ ID NO: 252 - DNA, 1089 bp, Artificial Sequence
  Synthetic polynucleotide
atgcagggggcgccatctgctgacggctccgtacttcacactctgtttcgctcggagcaaggaggtcatgaacaggtcgttctctgccaggatcgtgccagcggtttaagggcagtgattgctatccacgacaccgcactgggcccggctctgggcggtacgcgtttccacgcgtatgcttcagaagaagatgcagttctggatgccttgaatctgtctcgtggtatgagctacaagaacgcgctggctggcctggaccatggtggtggcaaagcagtgatcataggcgaccccgagctgatcaaaaccgaagaactactgctggcgtacgggagattcgtcgctagtttaggtggtcgatacgttactgcctgtgatgttggcacatatgtagcagacatggacgtagtggctcgcactaaccagtggaccaccggtcgttctcctgagaacgggggcgctggcgattccagcgtcctaactgcctttggtgttttccaaggcatgcgcgcgagtgctcagcacctgtggggtgacccgacgcttcgtggtcgtaaagttggcgttgctggcgtaggcaaagtgggtcatcaccttgtggaacatctgctgcaagatggagcagaagtcgttatcaccgatgtgcgcgctgaatcgattgagcgtgtgcgttctcgccacccgcaggttggcgtagcggctgacactggttccctgattcgtaccgcgggtctggatgtttacgcaccgtgcgccctcggcggagctctgaatgacgaaagcgtccctgctctgactgccaaggtagtttgcggtgcggcgaacaaccagctagctcatccgggggtcgaaaaagacctgagcgatcggggcgttctgtatgcgccggattacgttgtgaacgcaggtggcgttatccaggttgcagacgaactacacggtttcgattttgatcgctgtaaaactaaagctgcgaagatcttcgataccaccctggccattttcgctcgtgcgaaagaagacggcatcccaccggctgctgcggcagatcgtctggccgaacagcgcatggcagacgctcgaagggca

SEQ ID NO: 253 - DNA, 1062 bp, Artificial Sequence
  Synthetic polynucleotide
atgaagatcctggagactatgaaagcatccgactatgaacaactcgtgttttgccaggatgaaaaaacaggcttgaaaggaattatagccattcacgacacgactcttggtccagcgttaggcggtacccggatgtggacctacgataatgaagaggaagctatcgaagacgtactgcgtctggctcgtggtatgacttacaaatctgctgcggcaggcctgaacctgggcggtggtaagggggtcatcatcggggatcctaaaaaagacaaaagcgaagagatgtggcgcgccttcggcagattcgttcagtcgctgaacggtcgttacatcaccgctgaagatgttggtgttcgcgaaaccgacctggagatcgtgaacactgaaactgacttcgcagtaggcttgcccggtaagagtggcaacccgtctccggcgaccgcctatggcgtctactctggaattaaagctgttgcagatgagatctggggtagcgctgacctcaacggtaagactattgctatccagggcgcgggttccgtgggctattacctgtcagaactgctacataaagatggcgcaaaactaattgttaccgacatcgataaagaagctgtggataaactggtaagcgactttggggctactgccgttgaaacggatgaaatctacgaacaggaggcagatatattcgcgccgtgtgctctgggtgccattctgaatgacgaaaccatcccgaaactgaaagtaaaggcagtcgctggtgcggctaacaaccaactcgaggatgaaaagcgtcacgcggaagaactgaaaaaacgcggcatcgtatacgcgccggactatgttattaatgcgggaggcgtcatcaacgtatcttttgagctgactggttacgatgaggaacgtgcttatcgtaagatctccaccatctacgacaacattaaaaaaattttcaacatcgctaatagggatgatattaccagccacgaagctgctaaccgcatggctgaggaacgtatcgaagccatcaaacatgttaagacaagctacatcaataaa

SEQ ID NO: 254 - DNA, 1098 bp, Artificial Sequence
  Synthetic polynucleotide
atgacactggagatctttgaataccttgaaaagtatgactacgagcaagtagtcttctgccaggataaagaaagtggcttgaaagcaattatagccatccacgacactacgctgggtcctgctttagaagggactcgcatgtggacctatgatagcgaagaagctgcgatcgaagatgctctacgtctggcgaaaggtatgacctacaaaaatgcagctgccggcctcaacctgggtggcgcgaagactgttattatcggtgacccccgaaaagacaaatccgaggcaatgttccgtgcgctgggacgctacattcagggcctgaacggtagatacatcaccgctgaagatgtgggtacaaccgttgatgacatggacattatccatgaagagactgacttcgtgaccgggatctcaccaagctttggctcttctggtaacccgtccccggttacggcatatggcgtataccgcggcatgaaagctgctgcgaaagaagccttcggtactgataacctggaaggaaaggtaattgcggttcagggtgtcggtaatgtggcttatcacctctgtaaacatctgcacgctgagggcgctaagctgattgttaccgatatcaacaaagaagcagtccaaagggccgttgaggaatttggcgcgtcggcagtagagccgaatgaaatctacggtgttgaatgcgacatttacgccccgtgtgcgctgggcgccacggtcaacgatgaaactatccctcagctgaaagctaaggttatcgctggaagcgccaacaaccagctgaaagaagaccgtcatggggatatcatacacgaaatgggtatcgtgtatgcgccggattacgtgatcaacgcagggggtgttattaatgtggcggacgaattatacggctataaccgtgaacgcgctttgaaacgggttgaatctatttacgatactatcgcaaaagtaatcgaaatcagcaaacgtgatggtattgctacctacgtcgcagctgaccgcttggctgaagagcggatcgcatctttaaagaactcccgtagcacctatctgcgcaacggccacgatatcatatcgcgacgt

SEQ ID NO: 255 - DNA, 1098 bp, Artificial Sequence
  Synthetic polynucleotide
atgacactggagatctttgaataccttgaaaagtatgactacgagcaagtagtcttctgccaggataaagaaagtggcttgaaagcaattatagccatccacgacactacgctgggtcctgctttagggggcactcgcatgtggacctatgatagcgaagaagctgcgatcgaagatgctctacgtctggcgaaaggtatgacctacaaaaaggcagctgccggtctcaacctgggcggtgcgaaaactgttattatcggcgacccccgaaaagacaagtccgaggcaatgttccgtgcgctgggacgctacattcagggtctgaatggcagatacatcaccgctgaagatgtgggtacaaccgttgatgacatggacattatccatgaagaaactgacttcgtgaccgggatctcaccaagctttggctcttctggtaacccgtccccggttacggcatatggcgtataccgcggcatgaaagctgctgcgaaagaggccttcggtactgataacctggaagggaaagtaattgcggttcagggtgtcggtaatgtggcttatcacctctgtaaacatctgcacgctgaaggcgctaagctgattgttaccgatatcaacaaagaggcagtccaaagggccgttgaggaatttggtgcgtcggcagtagaaccgaacgaaatctacggcgttgaatgcgacatttacgccccgtgtgcgctgggtgccacggtcaacgatgaaactatccctcagctgaaagctaaggttatcgctggcagcgccaacaatcagctgaaagaagaccgtcatggagatatcatacacgagatgggtatcgtgtatgcgccggattacgtgatcaacgcagggggcgttattaacgtggcggacgaattatacggctataaccgtgaacgcgctttgaagcgggttgaatctatttacgatactatcgcaaaagtaatcgaaatcagcaaacgtgatggtattgctacctacgtcgcagctgaccgcttggctgaagagcggatcgcatctttaaaaaactcccgtagcacctatctgcgcaatggccacgatatcatatcgcgacgt

SEQ ID NO: 256 - DNA, 1089 bp, Artificial Sequence
  Synthetic polynucleotide
atgcagatcttcgacactttgcaatcaatgggccatgagcaggtggtcctatgtagcgataagaccacgggtctgcgcgccattatcgctatacacgatacatccttagggccggcgcttggtggtacccgtatgtggcagtatgcaactgacgacgatgctattactgacgcactccgtctgtctcggggcatgacctacaaagctgcggtttctggcgtaaatctgggcggtggtaaagccgttatcatcggaaaccctcacagtgataaaagcgaagcgctgtttcgcgcttacggcagaatggtggaatcccagcgtgggcgttacatcaccgccgaagacgttggtactagcgtacgtgatatggagtggattcgcatggaaaccaaatatgtaacgggcgtgggtggcaacggaggctctggtgacccctctccagttaccgctctgggtgtttactcgggcatgaaggcatgcgctaaatcagtctatggtactgatgcgctgagcggtaaaaggatcgtggttcagggcgcgggtaacgttgcatcccatctggttcacagtctggtaaaagaaggcgctgtggttttcgtcactgacatctacgaagaaaaggccaaagcattagcggctgaaacgggcgctaccgtgattcgcaccgacgaggtttttactacacaatgcgatatcttctctccgaacgctctgggggccgtcctgaacgatgaaactattccgcagctcacatgcgctatcgtagctggtggtgcaaacaatcagcttaaaatcgaacaacgtcacgccacggctctgcaagagaaaggcattctgtatgcgccggattacgtaatcaacgccgggggcctcatgaatgtggcgagcgaagttgacggctacaaccgtgaaaaggttatgcgccaggctgaaggtatttacgatattactatgaacatcctaaataccgcgcgtgagcgtaacatcctgaccatcgaagcatccaacgcgattgctgaagagcggatcaacaaagttcgccatgttcacgggaacttcatcggttccccgtctattcgcggagtataa

SEQ ID NO: 257 - protein, 366 aa, Bacillus cereus; identical to SEQ ID NO: 27

SEQ ID NO: 258 - protein, 360 aa, Cetobacterium ceti; identical to SEQ ID NO: 2

SEQ ID NO: 259 - protein, 346 aa, Pseudoalteromonas tunicata
MAVFNRVEFDNHEQVVFCSDQESGLKAIIAVHSTKLGPAVGGCRLWDYVSDEDAVYDVLRLSKGMTYKNAVARLPFGGGKSVIIGNAKEIKSEALFRAFGRKLEGLGGAYYSAEDVNITCADVAIMNKETNYVLGLEGKSGNPSPFTALGTFLGIKAAYQHQHGHQDLAGVKVAVQGLGAVAYSLCKYLYEAGASLYVTDINQASIDRVVNDFNATAVGIDEIYDLDVDVYSPCALGATVNDNTIARLKATIIAGCANNQLAESRHGELLRQKGILYAPDYVINAGGIINVYYETAPGGYSAQASTKHVEGIFGTLSEIFARSVTEQKSTHLIADELAQEIIANGL

SEQ ID NO: 260 - protein, 366 aa, Hassallia byssoidea
MEIKELEKVEQAGIFGKLSQLGHEQVVFCHDEATGLKAIIAIHNTVLGPALGGTRMWNYATEQEALTDVLRLSRGMTFKASISGLNLGGGKAVIIGDAKTMKTEAFMRRFGKFVDSLNGKYITAEDVNMKTADMEYIGMETKHVTGLPESMRGGGDPSPVTAYGVYLGMKAAAKKTYGNDSLTGKTIAVQGIGQVGTYLTEYLVKENANVYITDIAEDKVKALAQRLGVKTVAQDKIYDLDMDIYAPCALGATLNDDTIPRLNCQVVAGAANNQLKDESKHGYMLIDKGITYAPDFLINAGGLINVYNEFLGNYNRARVFEQAEGIYTTCMNIFKLAAQEKINTQEAAIKLAEKRIADIAQVRTRR

SEQ ID NO: 261 - protein, 363 aa, Hymenobacter daecheongensis; identical to SEQ ID NO: 4

SEQ ID NO: 262 - protein, 349 aa, Thalassospira profundimaris
MNVFSDIAFDDHEQVVFASDKTTGLKTIIAVHNTNLGPSLGGCRMWPYASEQDAIHDVLRLSRGMTYKSALANLPLGGGKSVIIGDPRSQKTPELFRAMGRAVEQLGGRYIVAEDVGTSPEDMGHIASQTKHVGGINDGKDPERTGDPSPFTAYGVFIGLKEAVRFKHGSDDLTGMRVAVQGLGHVGYHLCRMLHAAGAKLIVADLNAASMKAAAMEFGATAVPVDKILSVDADILAPCALGGVINDKTIEELKVGVIAGAANNQLEDDRHGEMLREAGILYAPDYVINAGGVIEVYYCREGKTVAETNMHIEGIGETVREIFERAKQQNLSTGFVADRLAEERFGLKK

SEQ ID NO: 263 - protein, 349 aa, Gemmatimonadetes bacterium
MFALLEEHEHEQVSLVYEPSSGYRGIIAIHDTTLGPALGGTRFWNYLNDREALIDCLRLARGMTYKAAVAGLNLGGGKSVIIGDNKIRNREPIFRAHGRHVKALGGRYITAEDVGTSVGDMEFIKAETDHVTGLIGKSGDPSPVTAFGVYRGIKACAKHRYGDAELRGKKVAIQGCGHVGYYLAELLYKEGADLIVTDIDSAKVERVVKAFEAKAVATDDIYGVPASVFAPCALGGIINDQTIAQLEVDIVAGGANNQLAEERHGDMLEERGITYAPDYVINAGGLVNVNAELEGWTMERARNKAGEIYDTLLMLFEIAGEEGIPSYRAADRLAERRIAAIAKVRQNFV

SEQ ID NO: 264 - protein, 364 aa, Unknown
  Virgibacillus sp. SK37
MEIFTYMEKYDYEQLVFCQDKSSGLKAIIAIHDTTLGPALGGTRMWTYNSEEEAIEDALRLAKGMTYKNAAAGLNLGGGKTVIIGDPKKDKNPEMFRAFGRYIQGLNGRYITAEDVGTTVQDMDLIHMETDFVTGISAEAGSSGNPSPVTAYGVYKGMKAAAKEAFNDDSLEGKTIAVQGVGNVAYALCEYLHKEGAKLVVTDINKGAVERAVEAFNATAVDPDDIYDVDCDIYAPCALGATINDDTIPRIKAKVIAGSANNQLKSSEHGDIIFEKGIIYAPDYVINSGGVINVADELVGYNEERALKKVETIYDSLQKVFEISRRDHIPSYVAADRMAEERIEAERNSRSQFLLNGHHILSRR

SEQ ID NO: 265 - protein, 365 aa, Jeotgalibacillus malaysiensis
MELFTYMEKYDYEQLVFCQDKNSGLKAIIAIHDTTLGPALGGTRMWTYDSEEDAIEDALRLAKGMTYKNAAAGLNLGGGKTVIIGDPLKDKNEEMFRAFGRYIQGLAGRYITAEDVGTTVKDMDLIHEETDYVTGISPAFGSSGNPSPVTAYGVYRGIKAAANEAYGSDSLEGKTIAVQGVGNVAFTLCRHLHEEGAKLIVTDINKESVQRAVDEFGAKAVEPNEIYGVDCDIFAPCALGAIINDNTLEVLKADVIAGAANNQLKETRHGDILHERGIVYAPDYVINAGGVINVADELYGYNRERAMKNVEKVYDNVARVFEIAKRDGVPSYLAADRMAEERIASMAKSRSQFLRSEHNILSRRS

SEQ ID NO: 266 - protein, 366 aa, Fictibacillus enclensis
MEIFKYMETYDYEQMVICQDKQSGLKAIIVIHDTTLGPALGGTRMWTYKSEEDALEDALRLARGMTYKNAAAGLNLGGGKTVIIGDPKKDKNEEMFRAFGRYIQGLNGRYITAEDVGTTVEDMDIIYQETPFVTGVSPAFGSSGNPSPVTAYGVYRGMKAAANEAFGTDSLEGKIIAVQGVGHVAYNLCRHLHEEGAKLIVTDINKEAVDRVVGEFGATAVDPDEIYGVECDIFAPCALGAIINDQTIGQIKAKVIAGAANNQLRETRHGDAIHEMGIVYAPDYVINAGGVINVADELNGYNRDRAMKKVETIYDNIAKVIEISKRDHIPTYLAADRLAEERIERMRNSRSQFLLNERHILSSRTR

SEQ ID NO: 267 - protein, 365 aa, Anaerobacillus arseniciselenatis
MELFKYMETYDYEQVVVCQDKQSGLKAIIAIHDTTLGPALGGTRMWTYNTEAEAFEDALRLAKGMTYKNAAAGLNLGGGKTVIIGDPRKDKNEEMFRAFGRYIQGLNGRYITAEDVGTTVGDMDIIHEETDYVTGISPAFGSSGNPSPVTAYGVYVGMKAAAKEAFGTDSLEGLTVAVQGVGNVSYTLCKHLHEEGAKLIVTDINKESVARAVEDFGAKSVDISDIYSVECDIFAPCALGAIINDDTIPQLKAKVIAGAANNQLKETKHGDQISELGIVYAPDYVINAGGVINVADELYGYNKERALKRVETIYDSISKIFEISKRDNIPTYMAADRMAEERIENMRKSRKQFLTNEHSILSRRR

SEQ ID NO: 268 - protein, 358 aa, Legionella hackeliae
MMSIDILKKTETSIPVQDDFLDYALAHGFGDLHFKVDPETGMKAIVAIHSTKLGPALGGCRFIEYPNTASAINDAMRLARGMSFKAASVNLPLGGGKAVIIKPNKPFDREAYLHAFGRFVNDLGGRYITALDSGTQLSDMDIIGQHTSYVASLSSHNGDPSPSTAKGVLRGIQAAVEFKLGKDNLNGLHIAIQGLGHVGYLLASHLHALGAKLTVTDVNPRAVQRAVEEFGATAVSTDMIHRVPCDVFAPCALGAVINDITISQLQTTIIAGAANNQLAHTYHGPILHEKGILYAADYVINAGGLVFAASKYFNTPQDQVNQQIDGIGTSLLEIFIRSQKENRPASEIADTLAQEKLA

SEQ ID NO: 269 - protein, 366 aa, Artificial Sequence
  Synthetic polypeptide
MTLEIFEYLEKYDYEQVVFCQDKESGLKAIIAIHDTTLGPALTGTRMWTYDSEEAAIEDALRLAKGMTYKNAAAGLNLGGAKTVIIGDPRKDKSEAMFRALGRYIQGLNGRYITAEDVGTTVDDMDIIHEETDFVTGISPSFGSSGNPSPVTAYGVYRGMKAAAKEAFGTDNLEGKVIAVQGVGNVAYHLCKHLHAEGAKLIVTDINKEAVQRAVEEFGASAVEPNEIYGVECDIYAPCALGATVNDETIPQLKAKVIAGSANNQLKEDRHGDIIHEMGIVYAPDYVINAGGVINVADELYGYNRERALKRVESIYDTIAKVIEISKRDGIATYVAADRLAEERIASLKNSRSTYLRNGHDIISRR

SEQ ID NO: 270 - protein, 366 aa, Unknown
  Marinobacter sp. X15-166B
MNVFSHPEFDNHEQVSFVSDPETGLRAIIAIHNTSRGPALGGCRMFPYASDEEALRDVLRLSRGMTYKSALANLDLGGGKSVIIGDPRQHKTEAMLEAMGRCLEKLGGHYIAAEDSGTSVADLQVMARHTRHVAGITSRPGFDGAPSDGDPSPVTAYGVFVGLKAAVQHGLGRTDLTGLKVAIQGIGNVGYRLARHLKDAGAELWVYDIHQEQMDRAVAELGATPATAEEILLLPVDVVAPCAMGAILNDESIPKLQARVIAGAANNQLAEARHDRALQQRGILYAPDFVLNAGGIIDVAHERTDQDPTKVRAHVDAIADTLGEIFTRSQRDQRPTGEIADELAEERFRRAPRRSTATANKVASVG

SEQ ID NO: 271 - protein, 363 aa, Unknown; identical to SEQ ID NO: 6
  Hymenobacter sp. CRA2

SEQ ID NO: 272 - protein, 366 aa, Artificial Sequence
  Synthetic polypeptide
MTLEIFEYLEKYDYEQVVFCQDKESGLKAIIAIHDTTLGPALGGTRMWTYDSEEAAIEDALRLAKGMTYKNAAAGLNLGGAKTVIIGDPRKDKSEAMFRALGRYIQGLNGRYITAVDVGTTVDDMDIIHEETDFVTGISPSFGSSGNPSPVTAYGVYRGMKAAAKEAFGTDNLEGKVIAVQGVGNVAYHLCKHLHAEGAKLIVTDINKEAVQRAVEEFGASAVEPNEIYGVECDIYAPCALGATVNDETIPQLKAKVIAGSANNQLKEDRHGDIIHEMGIVYAPDYVINAGGVINVADELYGYNRERALKRVESIYDTIAKVIEISKRDGIATYVAADRLAEERIASLKNSRSTYLRNGHDIISRR

SEQ ID NO: 273 - protein, 366 aa, Unknown; identical to SEQ ID NO: 8
  Arenimonas sp. SCN 70-307

SEQ ID NO: 274 - protein, 346 aa, Simiduia agarivorans
MSVFSHPEFDGHEHVAFYHDRKSGLKAIIAIHNTNLGPALGGCRMWPYATDEEALRDVLRLSKGMTYKSAVANIKLGGGKAVILGNHRTEKTRDLLLAMGDFVESLGGRYITAEDSGTSVADMKVIGERTRFAGGVVEGSEHGGDPSPTTAYGTYVGLKAAAKFRLGVDSLKGIRVAVQGVGNVGYRLAKHLHDDGAELVVSDIFSENTERAVRELGARVVEGDAIFDQDVDIFAPCALGAIINDNTIDRLKACVVAGAANNQLAEERHGELLRAREILYAPDYVINAGGIVDVYYQRTGESADKLKAHVEGIGDTLTEIFTRAAENQQPTGLVANKIAEERFNRA

SEQ ID NO: 275 - protein, 366 aa, Artificial Sequence
  Synthetic polypeptide
MTLEIFEYLEKYDYEQVVFCQDKESGLKAIIAIHDTTLGPALGGTRMWTYDSEEAAIEDALRLAKGMTYKNAAAGFNLGGAKTVIIGDPRKDKSEAMFRALGRYIQGLNGRYITAEDVGTTVDDMDIIHEETDFVTGISPSFGSSGNPSPVTAYGVYRGMKAAAKEAFGTDNLEGKVIAVQGVGNVAYHLCKHLHAEGAKLIVTDINKEAVQRAVEEFGASAVEPNEIYGVECDIYAPCALGATVNDETIPQLKAKVIAGSANNQLKEDRHGDIIHEMGIVYAPDYVINAGGVINVADELYGYNRERALKRVESIYDTIAKVIEISKRDGIATYVAADRLAEERIASLKNSRSTYLRNGHDIISRR

SEQ ID NO: 276 - protein, 366 aa, Artificial Sequence
  Synthetic polypeptide
MTLEIFEYLEKYDYEQVVFCQDKESGLKAIIAIHDTTLGPALGGTRMWTYDSEEAAIEDALRLAKGMTYKNAAAGLNLGGAKTVIIGDPRKDKSEAMFRALGRYIQGLNGRYITAEDVGTTVDDMDIIHEETDFVRGISPSFGSSGNPSPVTAYGVYRGMKAAAKEAFGTDNLEGKVIAVQGVGNVAYHLCKHLHAEGAKLIVTDINKEAVQRAVEEFGASAVEPNEIYGVECDIYAPCALGATVNDETIPQLKAKVIAGSANNQLKEDRHGDIIHEMGIVYAPDYVINAGGVINVADELYGYNRERALKRVESIYDTIAKVIEISKRDGIATYVAADRLAEERIASLKNSRSTYLRNGHDIISRR

SEQ ID NO: 277 - protein, 366 aa, Artificial Sequence
  Synthetic polypeptide
MTLEIFEYLEKYDYEQVVFCQDKESGLKAIIAIHDTTLGPALGGTRMWTYDSEEAAIEDALRLAKGMTYKNAAAGLNLGGAKTVIIGDPRKDKSEAMFRALGRYIQGLNGRYITAEDVGTTVDDMDIIHEETDFVTGISPSFGSSGNPSPVTAYGVYRGMKAAAKEAFGTDNLEGKVIAVQGVGNVAYHLCKHLHAEGAKLIVTDINKEAVQRAVEEFGASAVEPNEIYGVECDIYAPCALGATVNDETIPQLKAKVIAGSANNQLKEDRHGDIIHEMGIVYAPDYVINAGGVINVCDELYGYNRERALKRVESIYDTIAKVIEISKRDGIATYVAADRLAEERIASLKNSRSTYLRNGHDIISRR

SEQ ID NO: 278 - protein, 358 aa, Microbulbifer thermotolerans
MSIFSHPAYDKHEQVAFCQDAKSGLKAIIAVHNTNLGPSLGGCRMWPYADDGEALNDVLRLSRGMTYKSAMAGLKLGGGKAVIIGDPRKEKTPELLRAMGDFINTLGGRYITAEDSGTSVADMHIIGERTQYVSGLIAESEHGGDPSPSTAYGVFVGLKAAVEHRWGKSDLSGLKVSLQGVGNVGFRLAKLLKDAGAELFVTDIFQDNIDRAVSELGATAVSADEIFDLDVDLFAPCALGAVLNDDTIARLKVGAVAGAANNQLTEMRHAAALGEKGILYAPDYVINAGGIIDVYYQQQGDYDPARVKAHIETIGSTMQEIFQRAAETGETTAHVADRIAEERFGHEDASKNIDPAAA

SEQ ID NO: 279 - protein, 350 aa, Pseudomonas alcaligenes
MPVFTHIDFDHHEQVVFGHDQASGLKAIIAVHDTTLGPALGGCRMWNYASDEEALRDVLRLSRGMTYKSALARLPLGGGKAVIIGDPRSGKSEALFQAMGDFVDKLGGRYITAADSGTGVAEMQIMAQRTRHVAGAGQREAFDGGSRDGNPSPSTAYGVFVGIRAAVRHRLGRDDLKGLKVAIQGVGEVGFSLAKHLKDAGAELWVTDIFEANQRRAVEQLGARAVGQHDIFGLDVDVFAPCALGAIVNPQTLEALRAPIIAGAANNQLASPELAEQLQRRGVLYAPDYAINAGGIIDVCYERTGGSTAALKAHIEGIEATLAEIFQRAAAEGATTTAIADRMARERLGR

SEQ ID NO: 280 - protein, 347 aa, Rheinheimera nanhaiensis
MAVFNHSEFDNHEQVVFCSDAETGLKAIIAVHSTALGPAVGGCRLWNYASDEDAINDVLRLSRGMTYKNAMAGLPLGGGKSVIIGDAKSIKSEALFRAFGRMVHRLSGSYYSAEDVNITTGDIMIVNKETPFVAGLEGKSGNPAPFTALGTYRGIKAAAKHQFGSDDLRGKTVAVQGLGSVGFYLCEHLHRDGAKLIVTDINQDAVKRAVEQFAAVAVGLDDIYRVDADIYAPCALGATLNDNTISQLKVRIIAGCANNQLKEARHGEVLRQKGILYAPDYVINAGGIINVAFEMRPQGYSEAESTAKVMAIYDTLLNLFQRADAEQQPTSVVADLMAQEIIRRGKA

SEQ ID NO: 281 - protein, 366 aa, Artificial Sequence
  Synthetic polypeptide
MTLEIFEYLEKYDYEQVVFCQDKESGLKAIIAIHDTTLGPALGGTRMWTYDSEEAAIEDALRLAKGMTYKNAAAGLNLGGAKTVIIGDPRKDKSEAMFRALGRYIQGLNGRYITAEDVGTTVDDMDIIHEETDFVTGISPSFGSSGNPSPVTAYGVYRGMKAAAKEAFGTDNLEGKVIAVQGVGNVAYHLCKHLHAEGAKLIVTDINKEAVQRAVEEFGASAVEPNEIYGVECDIYAPCALGATVNDETIPQLKAKVIAGSANNQLKEDRHGDIIHEMGIVYAPDYVINAGGVINVYDELYGYNRERALKRVESIYDTIAKVIEISKRDGIATYVAADRLAEERIASLKNSRSTYLRNGHDIISRR

SEQ ID NO: 282 - protein, 367 aa, Lysobacter daejeonensis
MIFETLDTYGHEQVVFCHNKDAGLKAIIAIHNTVLGPALGGTRMWPYKSEQEALNDVLRLSRGMTYKNAVAGLNIGGGKAVIIGDPAKDKSEALFRAFGQFVDSLGGRYITAEDVGIDVNDMEYVYRETEFVTGVHQVHGGSGDPSPFTAYGTMQGLMASLNKRFGDEEVGKYSYAVQGLGHVGMEYVKLLKERGAKIFVTDINQSLVDKAVSEYGAEAVGLDEIYDVPADVYSPCALGGTVNEQTLPRLKAKIICGAANNQLANNAIGDEVQKRGILYAPDYAVNAGGVMNVALELEGYNRERAMRMMRTIYHNLHRIYEIAERDGVPTYQAADRLGEERIAAIGKLKLPLARGQTRFKGRIRGGN

SEQ ID NO: 283 - protein, 366 aa, Bacillus wakoensis
MELFSYMENYDYEQVVVCQDKVSGLKAIIAIHDTTLGPALGGTRMWMYDTEADAFEDALRLAKGMTYKNAAAGLNLGGGKTVIIGDPRKDKNEEMFRAFGRYIQGLNGRYITAEDVGTTVQDMDIIYEETEYVTGISPAFGSSGNPSPVTAYGVYVGMKAAAKEAFGSDDLGGKTIAVQGVGNVAYNLCKHLHEEGASLIVTDINKDSVARAVTDFGAKAVDINEIYGVDCDIFAPCALGAIINDETIPQFKAKVIAGAANNQLKEERHGSLIHDMGIVYAPDYVINAGGVINVADELNGYNSERALKKVEGIYQNIEKVFDISKRDQIPTFKAADRMAEERIERMRRSRRQFLQNGQHILSRRER

SEQ ID NO: 284 - protein, 366 aa, Marinobacter lipolyticus
MNVFSHPEFDNHEHLSFFCDPETGLKAIVAIHNTSRGPALGGCRMFPYASDEEAVWDVLRLSKGMTYKSALANLDLGGGKSVIIGDPRKEKTEALLEAMGRHLESLGGQYIAAEDSGTSVPDLKIMGRHTRHVAGISQHIGFDGKPSNGDPSPATAYGTFIGLKAAVSHKLGRSDLNGLKVAIQGIGNVGFRLARHLKEAGAELWVYDIHADNMQRAIDELGAKPASAEDILFLPVDVIAPCAMGAVLNDESIPQIKAPVVAGAANNLLERPDHDQALMDRGILYAPDFAINAGGIIDVSYERTGAPPEKVRAHVDTIGDTLNEIFTRSDRSGRPTGAIANELAEERFHKHTARVDAMQERMAHAG

SEQ ID NO: 285 - protein, 364 aa, Unknown
  Planococcus sp. Y42
MEIFKRMESQDYEQLVFCQDKTSGLKAIICIHDTTLGPALGGTRMWNYESEEEAIEDAIRLGRGMTYKNAAAGLNLGGGKTVIIGDPLKDKNEEMFRAFGRFIQGLNGRYITAEDVGTTVADMDLIHEETDFVTGISPAFGSSGNPSPVTAYGCYLGMKAAAKEAFGDDSLEGKTIAVQGVGNVAFTLCRYLHEEGAKLIVTDINQQAVQRAVDEFGATAVGINEIYSQEADIFAPCALGAIINDETIPQLKVKVVAGSANNQLKEERHGDMLEERGIVYAPDFVINAGGVINVADELNGYNQERAMKRVETIYDSISRIFEIAKRDGIPSYQAADRMAEERIDRVCRSRSQFLRNEHNILSRR

SEQ ID NO: 286 - protein, 364 aa, Brevundimonas diminuta
MGTTLFESPSFANHEGVHAFYDEKTGLKAIVAVHSTARGPAVGGTRMWNYASSAEALEDVLRLSKGMSYKNAIADLEMGGGKSVIIGDSRTQKSPELFHAFGRYLNGLGGHYYAAEDVGTSVEDIAEARKVTEFVLGLKDGPEASGDPSPVTAEGVFRSSLVVARRLFNQDDMTGLTVALQGVGHVGAYLAEKLHKAGAKLIITDVNQANLEAVAAKTGAEIVAPDAIYDVAADIYAPCALGATLNPQTLDRLKVKAVCGAANNQLATADIGDELFKRGILYSPDYVINGGGIINVASEMNARQTGGAYDASWVEGKLSRLMETFEEILERSVSENKPTHLIADAIAEARIKAAADAKAEAQKV

SEQ ID NO: 287 - protein, 366 aa, Bacillus selenitireducens
MELFKYMETYDYEQTVVCQDKESGLKAIIAIHDTTLGPALGGTRMWTYKSEEDAFEDALRLAKGMTYKNAAAGLNLGGGKTVIIGDPRKDKNEAMFRAFGRFIQGLNGRYITAEDVGTTVADMDLVYQETEYVTGISPAFGSSGNPSPVTAYGVYVGMKAAAKEAFGDDSLEGRTVAVQGVGNVSYKLCDYLHKEGAKLIVTDINKDAVKRAVEDFGAKAVDVDDIYSQDADIYSPCALGATINDETIPQLKARVIAGAANNQLRESRHGDIIQDKGIVYAPDYVINSGGVINVSDELIGYNRERALKKVETIYDNISKIFEISKRDGIASYKAADRMAEERIETMRKSRRQFLQNGMHILSRGRT

SEQ ID NO: 288 - protein, 366 aa, Artificial Sequence
  Synthetic polypeptide
MTLEIFEYLEKYDYEQVVFCQDKESGLKAIIAIHDTTLGPALGGTRMWTYDSEEAAIEDALRLAKGMTYKNAAAGLNVGGAKTVIIGDPRKDKSEAMFRALGRYIQGLNGRYITAEDVGTTVDDMDIIHEETDFVTGISPSFGSSGNPSPVTAYGVYRGMKAAAKEAFGTDNLEGKVIAVQGVGNVAYHLCKHLHAEGAKLIVTDINKEAVQRAVEEFGASAVEPNEIYGVECDIYAPCALGATVNDETIPQLKAKVIAGSANNQLKEDRHGDIIHEMGIVYAPDYVINAGGVINVADELYGYNRERALKRVESIYDTIAKVIEISKRDGIATYVAADRLAEERIASLKNSRSTYLRNGHDIISRR

SEQ ID NO: 289 - protein, 364 aa, Planomicrobium glaciei
MAIFDKMEQHDYEQLVFCQDKTSGLKAIICIHDTTLGPALGGTRMWNYATEEEAIEDAIRLGRGMTYKNAAAGLNLGGGKTVIIGDPLKDKNEEMFRAFGRFVQGLNGRYITAEDVGTTVADMDLIREETDFVTGVSPAFGSSGNPSPVTAYGVYKGMKAGALEAFGDDSLEGKTVTVQGVGNVAYTLCKHLHEEGAKLIVSDINEEAVQRAVNDFGAVAVAPNDIYSQEADIFAPCAMGAIINDETIPQLKVKLVAGSANNQLKEERHGDELEARGIVYTPDFVINSGGVINVADELYGYNEERALKRVGTIYDSISKIFEISKRDGIPSYKAADRLAEERIERVAKSRSSFLRNEHNIISRR

SEQ ID NO: 290 - protein, 365 aa, Anaerobacillus macyae
MELFTYMEKYDYEQVVVCQDKASGLKAIIAIHDTTLGPALGGTRMWTYASEEAAFEDALRLAKGMTYKNAAAGLNLGGGKTVIIGDPRKDKNEAMFRAFGRYIQGLNGRYITAEDVGTTVQDMDTIHEETEYVTGISPAFGSSGNPSPVTAYGVYVGMKAAAKEAFGTDSLEGKTVAVQGVGNVAYNLCKHLHEEGASLVVTDINKESVDRAVADFGAKAVDPDDIYEVDCDIFAPCALGAIINDDTIGKIKAKVIAGAANNQLRETTHGDQIHEMGIVYAPDYVINAGGVINVADELYGYNRDRAMKRVDGIYDTIAKVIEISKRDGIPTYAAADRLAEERIAQMKHSRSQFLMNSQHILGHRK

SEQ ID NO: 291 - protein, 366 aa, Artificial Sequence
  Synthetic polypeptide
MTLEIFEYLEKYDYEQVVFCQDKESGLKAIIAIHDTTLGPALGGTRMWTYDSEEAAIEDALRLAKGMTYKNAAAGLNLGGAKTVIIGDPRKDKSEAMFRALGRYIQGLNGRYITAEDVGTTVDDMDIIHEETDFVTGISPSFGSSGNPSPVTAYGVYRGMKAAAKEAFGTDNLEGKVIAVQGVGNVAYHLCKHLHAEGAKLIVTDINKEAVQRAVEEFGASAVEPNEIYGVECDIYAPCALGATVNDETIPQLKAKVIAGSANNQLKEDRHGDIIHEMGIVYAPDYVINAGGVINVADEKYGYNRERALKRVESIYDTIAKVIEISKRDGIATYVAADRLAEERIASLKNSRSTYLRNGHDIISRR

SEQ ID NO: 292 - protein, 351 aa, Pseudomonas alcaligenes
MSVFSHVEFDGHEQVVFGHDKASGLKAIIAIHNTNLGPALGGCRMWNYANDEQALRDVLRLSRGMTYKSALANLPLGGGKAVIIGDPHNGKSEALFQAMGDFVDTLGGRYITAADSGTGPAEMQIMAERSRHVAGANQREAFDGGVRSGDPSPSTAYGVFIGIQVAVKHRLRRDDLKGLRVAIQGVGQVGFHLARLLRDAGAELWVTDIVDANVRRAVEQLGAKAVLQHEIYGLNVDVFAPCAMGGIINPQSLEALRVPIIAGGANNQLADAQLAEELKRNGCLYAPDYAINAGGIIDVYFERSGGSAAELKAHIEGIGNTLRQIFIRADEEGRTTTEVADRLAEERFGRV

SEQ ID NO: 293 - protein, 364 aa, Unknown
  Thermoactinomyces sp. DSM 45891
MKLFDYMEKYDYEQVVICQDKNSGLKAIIAIHDTTLGPALGGLRMWTYATEEEAMEDALRLARGMTYKAAAAGLNLGGGKTVLIGDPKKDKSEELFRSLGRYIEGLNGRYITAEDVGTSVEDMDLIHLETKYVTGISPAFGSSGNPSPVTAFGVYKGMKAAAKEAFGSDALDGLVVAVQGVGNVAYSMCEYLHKENVKLIVTDINEENVQRAVNDFGAIRVSPEEIYDVECDIFAPCALGGIINDDTIERLKCKVVAGSANNQLREDRHGDILEERGMVYAPDYVINAGGLINVADELVGYNPERAMKKVEGIYDNILRVFEIAKRDGIPSYQAADRMAEERIASLRQSRSTFVQTERHSLNQR

SEQ ID NO: 294 - protein, 365 aa, Pseudobacteriovorax antillogorgiicola
MAIFETLAGTGHEQVVFCNDEATGLKAIIAIHDTTLGPALGGCRMWDYGSEEEALEDVLRLSRGMTYKAAVSGLSLGGGKSVIIGDPKKLKNEAFFRTFGRFVDSLSGRYITAEDVNIRVKDMESVALETPYVTGINSRVGGSGDPSPVTAWGVFNGIKASVKHKLGKDSVNGLTVAVQGCGAVGTFLTEFLTQEGAKVFAADLNQDKVKNVVESFGAEAVDLNKIHSLPVDVYAPCALGGILNDNTIPELQTTIVSGGANNQLLDEAKHAAMLKEKGILYAPDYVINAGGLINVYQELQGYDADAARTKAAGIFDTLINIYKESDEQGITTIQASNKIAEDRINSVRNMKDLRNNFEGQLWINQ

SEQ ID NO: 295 - protein, 348 aa, Oceanibaculum pacificum
MPIFTAPDFDNHEQVVFCNDAETGLKAIIAIHDTTRGPSLGGCRMWPYASEAAAVTDALRLSRGMTYKSALAGLPLGGGKSVIIGDAKTQKSPALFRAFGRFVDSLGGRYIAAEDVGTGVADIEAMRQVTRHVAGTAGGSGDPSPVTAYGVFQGIRAAAKAKLGRDDLAGLRVAVQGLGHVGLDLARQLYEAGAALIVADIDLDRIARATTAYRAEAMPADRIHAADVDIFAPCALGAILNDATIPEIKAGIIAGAANNQLAEERHGAALMKRGILYAPDYAINAGGIINIHHESAGKYDRAAALRQVEGIYDTLLEIFARAAAEGIPTSDAADRVAETRFGKHRQAA

SEQ ID NO: 296 - protein, 357 aa, Saccharomonospora glauca
MTDGVFGRDGGHEQVVYCQDPQTGLKAIIAVHSTALGPALGGTRFYPYASEQDALNDVLALSRGMSYKNALAGLDLGGGKAVIIGDPATVKSEALLRAYGRFVETLGGRYITACDVGTYVADMDVVARETRYVTGRSRDDGGAGDSSVLTAYGVFQGMRASAEHVWGTPELRGRRVGVAGVGKVGHLLVGHLVEAGAEVVVTDVSEAAIDRVRSAHPSVEVVADTDTLVASDIDVYAPCALGGALNDATVEVLRAKVVCGAANNQLAHPGVEKLLDERGILFAPDYLVNSGGVIMVSDELHGFQYERAHRKVSALYETTKKVFALAEEEGVPPATAADRLAERRMAEVSRLRSILTR

SEQ ID NO: 297 - protein, 364 aa, Pseudomonas stutzeri
MSVFAHPDFDRHEQVVFCHDQASGLKAIIAIHDTRLGPALGGCRMFPYASDDEALRDVLRLSRGMTLKSSLAGLKLGGGKAVIIGDPHTGKSQALLHAMGDFVDSLGGRYITAADSGTGDAEMQAFAQRTRHVVGATPRTLLDGSVASGDPSPSTAYGVYVGLKEAVRQRLGRDELTGLKVAIQGVGHVGLGLARHLKAAGAELWVADIFDANVKQAMEEVGANVVRPQDIYGLDVDVFAPCAMGGILNEQTLEVLRAPVIAGAANNQLASAGIGVELQRRNQLYAPDYAINAGGIIDVYYQRNGGSAAQIDAHVNAIAGTLREIFERAAASGECTSVIADRLALERLQAGGAPQVATLQRQAS

SEQ ID NO: 298 - protein, 365 aa, Unknown
  Bacillus sp.
MEIFKKLEEHDYEQLVICQDKTSGLKAIIAIHDTTLGPALGGARMWTYESEEAAIEDALRLARGMTYKNAAAGLNLGGGKTVIIGDPRTDKNDEMFRAFGRYIEGLNGRYITAEDVGTTEEDMDLIHLETDYVTGTSAADSGSSGNPSPVTAFGIYKGMKATAKEAFGDDSLAGKTIAVQGVGNVAYSLCEYLHEEGAKLIVTDINEEAVQRAVEAFGATAVGIDEIYSQEADIFAPCALGAVINDDTIPQLKVKVIAGSANNQLKDPSHGDQLHEMGIVYAPDYVINSGGVINVADELDGYNRERALKRVATIYDTIEKIFAISKRDNIPSYVAADRLAEERIARVAKVRSQFLQNEKSVLSRR

SEQ ID NO: 299 - protein, 366 aa, Artificial Sequence
  Synthetic polypeptide
MTLEIFEYLEKYDYEQVVFCQDKESGLKAIIAIHDTTLGPALGGTRMWTYDSEEAAIEDALRLAKGMTYKTAAAGLNLGGAKTVIIGDPRKDKSEAMFRALGRYIQGLNGRYITAEDVGTTVDDMDIIHEETDFVTGISPSFGSSGNPSPVTAYGVYRGMKAAAKEAFGTDNLEGKVIAVQGVGNVAYHLCKHLHAEGAKLIVTDINKEAVQRAVEEFGASAVEPNEIYGVECDIYAPCALGATVNDETIPQLKAKVIAGSANNQLKEDRHGDIIHEMGIVYAPDYVINAGGVINVADELYGYNRERALKRVESIYDTIAKVIEISKRDGIATYVAADRLAEERIASLKNSRSTYLRNGHDIISRR

SEQ ID NO: 300 - protein, 349 aa, Unknown
  Idiomarina sp. A28L
MALFEHTEYDGHEQVVFCHDKVTGLKAIIAVHDTTMGPALGGTRMWNYASSEEALTDVLRLSRGMTYKSALAGLPLGGGKAVIIGDAKKDKSEAFFKAYGRFVNSLGGKYITAEDVNIRTADIDIVATETSFVAGTASKAGDPSPHTAEGTYLGLKAAAKHAFGNEDLKGVRIAIQGLGAVGYDFAEYCAKEGAKLIVADVNEEAVERAVKELGAEAVSIHDIYSVDCDVYAPCALGATINDDTLKLIKAKVIAGSANNQLATPAHDKIVKDMGILYAPDYVINAGGVIHVCSEAANFSLEDTAKRVKAIYGTLDKIFTRAKDENRPTGEIADEMAREILAKKLASKTA

SEQ ID NO: 301 - protein, 368 aa, Novibacillus thermophilus
MEIFAQLSQYDYEELVFCHDENSGLRAIIAIHDTTLGPALGGVRMWTYESEQEAVQDVLRLARGMTYKNAVAGLNLGGGKAVIIGDPNKDKSEELFRAFGRYVQGLNGRYITAEDVGTTEEDMDTIYEETDYVTGVSPAFGSGGNPSPVTAYGVYQGMKAAANVAFGSDDLNGKTVAVQGLGNVAFNLCRHLSEEGAKLVVTDLNEERVQRAVEQFGAEAVGVQDIYGVACDIFSPNALGGVLNDETIPMLNCRVVAGAANNQLKEERHGKMLEERGIVYAPDYVINAGGVINIADELIGYNRERAMKKVESIYDTVLNVFAIAERDGIPSYQAADRMAEERIQSIRRSRNPFVRDEKNVFHLRRGRH

SEQ ID NO: 302 - protein, 347 aa, Idiomarina woesei
MSLFEHKEFDQHEQVVFCHDKETGLKAIIAIHDTTLGPSLGGTRMWNYASSAEALTDVLRLSRGMTYKSALAGLPLGGGKAVIIGDAKAIKTPDLMRAYGRFVNSLSGRYITAEDVNIRTSDIAHVAEETSFVAGTAEKAGDPSPHTALGTYLGLKAAAKHKFGNDNLNGLKIAVQGLGAVGYDFAEYCAKEGAQLFVTDINEDACNKAATELNATIVGLDDIYGLDVDVYAPCALGATINDETLKQIKAKIIAGSANNQLATPPHDKIVMDMGILYAPDYVINAGGVIHVCSEAANMSREETDKRVRDIYDTLDKIFARSSAEHRPTGEIADQMAREVIANAKAAR

SEQ ID NO: 303 - protein, 362 aa, Chlorobi bacterium
MKLFDTLQTMGHEQVVLCSDPVTGLRAVIAIHDTSLGPALGGTRMWNYSTDEDAITDALRLSRGMTYKAAVSGVNLGGGKAVIIGDPRTDKNEAKFRSYGKMVESLRGRYITAEDVGTSVRDMEWIRMETRFVTGVGGVGGSGDPSPVTAFGVYSGMKAAAKFAWGTDSLSKKRVVVQGAGHVASNLVKHLVKDGAIVFVSDIYEERSNKVAAETGATVISPDEVFTTPCDIFSPNALGAVLNNETIAQLSCSVVCGAANNQLQNEDVHAAALQKQNIIYAPDYVVNSGGLMNVASEVTGYDRDSVMRQAEGIYDITMNILTTARDKNILTIEASNAIAEERIKKVRHVHGMFTGTPSIRGL

SEQ ID NO: 304 - protein, 364 aa, Pontibacillus halophilus
MEIFKYLNEYDYEQLLFCHDEQSGLKAIIAIHDTTLGPALGGTRMWTYATEEEAIVDALRLARGMTYKNAAAGLNLGGGKTVIIGDPKKEKNEEMFRAFGRFIQGLNGRYITAEDVGTTVQDMDTIHEETNYVTGISPAFGSSGNPSPVTAFGVYRGMKAAAKAAFGTDSLEGRTIAVQGVGSVAYNLCKYLHEEGANLVVTDINKEAVQRAVDEFGATAVETDEIYGVDCDIYAPCALGATINDDTISQLKAKVIAGAANNQLKDTTHGDAIHEMGIYYAPDYVINAGGVMNVADELYGYNQERALKRVEGIYDNVARVFEIAERDGIPSYQAADRMAEERIERMRKSRSTFLQNEKSILNRR

SEQ ID NO: 305 - protein, 358 aa, Gemmatimonas phototrophica
MHYFDTIAEMGHEQVVFCHDKASGYRGIIAIHDTTLGPALGGCRFWNYASDEEAVIDALRLSRGMTYKNAVAGLNLGGGKSVIIGNNKTAQREMLFRAHGRFVDSLGGRYVTAEDVGTTVEDMDFVHMETTHVTGIGSKSGDPSSVTARGVFRAIQASAFQKWGSKELTGRTVAIQGLGHVGYYLARELHVAGARLLVTDIDAGRIDRVVQEFGATSVALADIYAAKADIFAPCALGGILNDDTIPQLSVEIVSGAANNQLLEDRHGDELESRGILYAPDYVANAGGVINVYSELTGWSADRSLRKADEIYETVLSVFTLAKSTGIPTYKAADRVAEQRIAAVRGMMRTWPQYPNKEA

SEQ ID NO: 306 - protein, 349 aa, Paraglaciecola arctica
MSVFEHSEFDGHEHVAFHQDKASGLKAIIAVHNSNLGNALGGCRMWPYSSDEEALRDVLRLSKGMTYKAAMAGLKQGGGKAVILGNPRTEKTPEKMLAMGKFINSLSGQYISAEDSGLTVDDLKLMAKETAYVSGIQAKYHINSESADGNPAPSTAYGVFVGLRTSVEHTMNSDLKNVKVAIQGLGHVGMRLAKHLCNQGAKLYVTDIHPENIEKAVNEFSAIAVNPNDIYDLDVDVFAPCAMGAILDAENIGRLRVKVIAGAANNQLAKEVFGQLLVDKGILYAPDYVINAGGVIDIYHQSIASSDKGLRDHIEKISDTLLEIYRRAEAQGIATNIVANQIAEERFSK

SEQ ID NO: 307 - protein, 347 aa, Unknown
  Alishewanella sp. WH16-1
MAVFNHPEFDQHEQVVFCSDQETGLKAIIAVHSTRLGPAVGGCRLWDYASDEDALVDVLRLSRGMTYKNAMAGLPLGGGKSVIIGNAKTIKSEALFKAFGRMVHRLGGSYYSAEDVNITTHDIMQVHQETPFVAGLEGKSGNPGPFTALGTYQGIKAAAKHQFGSADLAGKTVAVQGLGSVGFYLCEHLHKEGAKLIVTDINQDAVNRAVAQFGATAVGLNDIYGVAADIYAPCALGATINDDTIPQLKAKVVAGCANNQLKRPEHGQKLRDSGILYAPDYVINGGGIINVAFEMRPQGYNAAESTAKVMQIYDTLLRIFERADAEDKPTSTVADQMAQEIIARGPL

SEQ ID NO: 308 - protein, 355 aa, Anaerobranca californiensis
MEIFKYMEKYDYEQLVICHDKTSGLKAIIGIHDTTLGPALGGTRMWNYKTEEEAIEDALRLSRGMTYKAAAAGLNLGGGKTVIWGDPKTQKSEELWRAFGRFVQSLNGRYITAADVGTVVDDMDYIRQETKHVVGVSKTLGGSGDPSPKTAYGVFRGIQACANEVWGSDDITGRVVAVQGVGKVGYYLCEYLHKAGAKLIVSDIDKEAVDRVVREFGAQAVGLDEIYGVECDIYSPNALGATINDETIPQFKCKIIAGGANNQLKEERHGDIITEKGIIYAPDYVINAGGLINVADELKGYNEERAMQSVSKIYDNIKKVFQIAKRDNIPTYKAADRMAEERIEKLGRVRNTYLG

SEQ ID NO: 309 - protein, 366 aa, Artificial Sequence
  Synthetic polypeptide
MTLEIFEYLEKYDYEQVVFCQDKESGLKAIIAIHDTTLGPAQGGTRMWTYDSEEAAIEDALRLAKGMTYKNAAAGLNLGGAKTVIIGDPRKDKSEAMFRALGRYIQGLNGRYITAEDVGTTVDDMDIIHEETDFVTGISPSFGSSGNPSPVTAYGVYRGMKAAAKEAFGTDNLEGKVIAVQGVGNVAYHLCKHLHAEGAKLIVTDINKEAVQRAVEEFGASAVEPNEIYGVECDIYAPCALGATVNDETIPQLKAKVIAGSANNQLKEDRHGDIIHEMGIVYAPDYVINAGGVINVADELYGYNRERALKRVESIYDTIAKVIEISKRDGIATYVAADRLAEERIASLKNSRSTYLRNGHDIISRR

SEQ ID NO: 310 - protein, 364 aa, Pontibacillus yanchengensis
MEIFKYMKEYDYEQLVFCQDEQSGLKAIIAIHDTTLGPALGGTRMWTYASEDEAIEDALRLAKGMTYKNAAAGLNLGGGKTVIIGDPKTEKNEEMFRAFGRYIQGLNGRYITAEDVGTTVHDMDTIHEETDYVTGISPAFGSSGNPSPVTAYGVYRGMKAAAMEAFGTDSLEGKVIAVQGVGNVAYNLCKHLHEEGAQLIVTDINKEAVNRAVENFGAKAVETEEIYSVDCDIYAPCALGAVINDETIPQIKAKVIAGAANNQLKESRHGDLIHEMGIVYTPDYVINAGGVINVADELYGYNYDRAMKRVEGLYDTCTRIFEIARRDNIPTYMAADRMAEERIEKMRKTKSTFLQNEHHILSRR

SEQ ID NO: 311 - protein, 366 aa, Artificial Sequence
  Synthetic polypeptide
MTLEIFEYLEKYDYEQVVFCQDKESGLKAIIAIHDTTLGPALGGTRMWTYDSEEAAIEDALRLAKGMTYKNAAAGLNLGGAKTVIIGDPRKDKSEAMFRALGRYIQGLNGRYITAEDVGTTVDDMDIIHEETDFVTGISPSFGSSGNPSPVTAYGVYRGMKAAAKEAFGTDNLEGKVIAVQGVGNVAYHLCKHLHAEGAKLIVTDINKEAVQRAVEEFGASAVEPNEIYGVECDIYAPCALGATVNDETIPQLKAKVIAGSANNQLKEDRHGDIIHEMGIVYAPDYVINAGGVINVHDELYGYNRERALKRVESIYDTIAKVIEISKRDGIATYVAADRLAEERIASLKNSRSTYLRNGHDIISRR

SEQ ID NO: 312 - protein, 367 aa, Unknown
  Flavobacterium sp. Leaf359
MITEVAKASELHKIDPVFGQLSFDNHEQIVFCNDKDTGLKAIIGIHNTVLGPALGGTRMWKYTNEWEALNDVLRLSRGMTFKSAISGLNLGGGKAVIIGDSKVDKTPEMMIKFGEFINSLSGKYITAEDVGTTTPDMDLIRDVTPYVTGISQSRGGSGNPSPVTAYGVYMGMKAAAKYQFGSDNLEGKKILVQGTGNVGETLIDHLTKEGALVQITDINEAKLKEISQKYGAQIFTGEDIYSAPVDIYAPCALGATINDTTVNKIQAKVIAGAANNQLANEEIHGKILKDRGIAYAPDFLINAGGIINVYAEIVGYDSAEALRRTENIYNTTLEIFNFAETNSITTHQAALSIAQKRIDDRKKENAK

SEQ ID NO: 313 - protein, 355 aa, Desulfosporosinus acidiphilus
MKIFEYLEKYDYEQLVICQDETSGLKAIICIHDTTLGPALGGTRMWNYECEEDAILDALRLARGMTYKNAAAGLNLGGGKTVIIGDSRTQKSEELFRAFGRYVQSLNGRYITAEDVGTTVRDMDWVHLESNFVTGVSSSGASGDPSPMTARGVWKGMKAAAKEMFGDDSLEGKTIAIQGLGHVGYYLAKHLREEGAKLIVTDIHEDAIKRVLNEMDATVVEPEEIFGVDADIYAPCAMGAVINDKTIPQFKFKVIAGAANNVLLEDRHGDKLHELGILYAPDYVINAGGVINVADELEGYDYQRALQKVDTVYDNVAKVLQIAKQMNIPTYKAADRMAEERIQRLGRIRSNYLRK

SEQ ID NO: 314 - protein, 366 aa, Artificial Sequence
  Synthetic polypeptide
MTLEIFEYLEKYDYEQVVFCQDKESGLKAIIAIHDTTLGPALGGTRMWTYDSEEAAIEDALRLAKGMTYKNAAAGLNLGGAKTVIIGDPRKDKSEAMFRALGRYIQGLNGRYVTAEDVGTTVDDMDIIHEETDFVTGISPSFGSSGNPSPVTAYGVYRGMKAAAKEAFGTDNLEGKVIAVQGVGNVAYHLCKHLHAEGAKLIVTDINKEAVQRAVEEFGASAVEPNEIYGVECDIYAPCALGATVNDETIPQLKAKVIAGSANNQLKEDRHGDIIHEMGIVYAPDYVINAGGVINVADELYGYNRERALKRVESIYDTIAKVIEISKRDGIATYVAADRLAEERIASLKNSRSTYLRNGHDIISRR

SEQ ID NO: 315 - protein, 356 aa, Tenericutes bacterium
MNKFDYMEKHGYEQMVYFYDKTTGLKGITCIHDTTLGPALGGTRILNYASEEDAVLDCLRLARGMTYKSAAAGLNLGGGKTVLIGDPNVVKNEAYFRALGRFIQSLNGRYITAEDVNTNTKDMDFVAMETDHVVGLESKSGNPSPITALGAYHGIRAAIKFAFGDDDVTKRTFAVQGAGQTGYYLINFLVENKAKKIYFSEINPKHVERMQKEHPEVEFVKPENFFECDVDVICPCALGAVLNDETIPKIKAKVIAGTANNVLLDEDRHGNMIKEKGILYAPDFVINAGGVINVFNELGTYNRDKVQRDVEKIYDRLIDIFTIAKEDNIHTQEAAKRFAKMRMETIGRVRSNYVPR

SEQ ID NO: 316 - protein, 366 aa, Artificial Sequence
  Synthetic polypeptide
MTLEIFEYLEKYDYEQVVFCQDKESGLKAIIAIHDTTLGPALGGTRMWTYDSEEAAIEDALRLAKGMTYKNAAAGLNLGGAKTVIIGDPRKDKSEAMFRALGRYIQGLNGRYITAEDVGTTVDDMDIIHEETDFVTGISPSFGSSGNPSPVTAYGVYRGMKAAAKEAFGTDNLEGKVIAVQGVGNVAYHLCKHLHAEGAKLIVTDINKEAVQRAVEEFGASAVEPNEIYGVECDIYAPCALGATVNDETIPQLKAKVIAGSANNQLKEDRHGDIIHEMGIVYAPDYVINAGGVINVNDELYGYNRERALKRVESIYDTIAKVIEISKRDGIATYVAADRLAEERIASLKNSRSTYLRNGHDIISRR

SEQ ID NO: 317 - protein, 366 aa, Artificial Sequence
  Synthetic polypeptide
MTLEIFEYLEKYDYEQVVFCQDKESGLKAIIAIHDTTLGPALGGTRMWTYDSEEAAIEDALRLAKGMTYKNAAAGLNLGGAKTVIIGDPRKDKSEAMFRALGRYIQGLNGRYITAEDVGTTVDDMDIIHEETDFVTGISPSFGSSGNPSPVTAYGVYRGMKAAAKEAFGTDNLEGKVIAVQGVGNVAYHLCKHLHAEGAKLIVTDINKEAVQRAVEEFGASAVEPNEIYGVECDIYAPCALGATVNDETIPQLKAKVIAGSANNQLKEDRHGDIIHEMGIVYAPDYVINAGGVINVMDELYGYNRERALKRVESIYDTIAKVIEISKRDGIATYVAADRLAEERIASLKNSRSTYLRNGHDIISRR

SEQ ID NO: 318 - protein, 348 aa, Unknown
  Thalassospira sp. MCCC 1A03138
MNVFSDTAFDGHEEVVFASDPDTGLKAIIAVHNTNLGPSLGGCRMWPYASEQEAIHDVLRLSRGMTYKSALANLPLGGGKSVIIGDPRSQKTPELFRAVGRAVERVGGRYIVAEDVGTSPEDMEQIASQTKHVGGINDGKDPARTGDPSPFTAYGVFIGLKEAVRFKNGHDDLAGLRVAVQGLGNVGYHLCRMLHSAGARLVVSDLNANSVNRAVEEFGATAVSTDEILFIDADILAPCALGGVVNDRSIDKIRARIIAGAANNQLEADRHGEMLREAGILYAPDYVINAGGVVEVYYCREGRPVSETNKHIEGIAATVREIFERADRQNLSTGFVADRLAEERFGKR

SEQ ID NO: 319 - protein, 366 aa, Artificial Sequence
  Synthetic polypeptide
MTLEIFEYLEKYDYEQVVFCQDKESGLKAIIAIHDTTLGPALGGTRMWTYDSEEAAIEDALRLAKGMTYKNAAAGLNLGGAKTVIIGDPRKDKSEAMFRALGRYIQGLNGRYITAEDVGTTVDDMDIIHEETDFVTGISPSFGSSGNPSPVTAYGVYRGMKAAAKEAFGTDNLEGKVIAVQGVGNVAYHLCKHLHAEGAKLIVTDINKEAVQRAVEEFGASAVEPNEIYGVECDIYAPCALGATVNDETIPQLKAKVIAGSANNQLKEDRHGDIIHEMGIVYAPDYVINAGGVINVLDELYGYNRERALKRVESIYDTIAKVIEISKRDGIATYVAADRLAEERIASLKNSRSTYLRNGHDIISRR

SEQ ID NO: 320 - protein, 355 aa, Peptococcaceae bacterium; identical to SEQ ID NO: 12

SEQ ID NO: 321 - protein, 366 aa, Artificial Sequence
  Synthetic polypeptide
MTLEIFEYLEKYDYEQVVFCQDKESGLKAIIAIHDTTLGPALGGTRMWTYDSEEAAIEDALRLAKGMTYKNAAAGLNLGGAKTVIIGDPRKDKSEAMFRALGRYIQGLNGRYITAADVGTTVDDMDIIHEETDFVTGISPSFGSSGNPSPVTAYGVYRGMKAAAKEAFGTDNLEGKVIAVQGVGNVAYHLCKHLHAEGAKLIVTDINKEAVQRAVEEFGASAVEPNEIYGVECDIYAPCALGATVNDETIPQLKAKVIAGSANNQLKEDRHGDIIHEMGIVYAPDYVINAGGVINVADELYGYNRERALKRVESIYDTIAKVIEISKRDGIATYVAADRLAEERIASLKNSRSTYLRNGHDIISRR

SEQ ID NO: 322 - protein, 366 aa, Artificial Sequence
  Synthetic polypeptide
MTLEIFEYLEKYDYEQVVFCQDKESGLKAIIAIHDTTLGPALGGTRMWTYDSEEAAIEDALRLAKGTTYKNAAAGLNLGGAKTVIIGDPRKDKSEAMFRALGRYIQGLNGRYITAEDVGTTVDDMDIIHEETDFVTGISPSFGSSGNPSPVTAYGVYRGMKAAAKEAFGTDNLEGKVIAVQGVGNVAYHLCKHLHAEGAKLIVTDINKEAVQRAVEEFGASAVEPNEIYGVECDIYAPCALGATVNDETIPQLKAKVIAGSANNQLKEDRHGDIIHEMGIVYAPDYVINAGGVINVADELYGYNRERALKRVESIYDTIAKVIEISKRDGIATYVAADRLAEERIASLKNSRSTYLRNGHDIISRR

SEQ ID NO: 323 - protein, 364 aa, Salinicoccus halodurans
MIFDKMVEFDYEQLVFCHDETSGLKAIICIHDTTLGPALGGCRMWNYETEEEAIEDVLRLARGMTYKNAAAGLNLGGGKTVVIGDAKKDKSEAFFRALGRYVNSLNGRYITAEDVGTTVADMDLIYQETPYVCGMSESYGTGGNPSPMTAFGVYMAMKRTAKEAFDDDSLEGRTIAVQGVGNVSYSLCRHLHEEGAKLVVTDISQEAIDRAVNDFGAKAVGIEEIYDVEADIFAPCALGGVLNDETIPALKVKAVCGSANNQLLEEDKHGELLQQRGIVYAPDYVVNCGGVINVADELQGYNKERAKSKVEGIYDQMDKIFNIARRDRITPAVAADRLAEERIESMMRVKSTFSQNEITPLSRR

SEQ ID NO: 324 - protein, 374 aa, Exiguobacterium antarcticum
MVETNVEARFSIFETMAMEDYEQVVFCHDKVSGLKAIIAIHDTTLGPALGGLRMWNYASDEEALIDALRLAKGMTYKNAAAGLNLGGGKAVIIGDAKTQKSEALFRAFGRYVQSLNGRYITAEDVNTTVADMDYIHMETDFVTGVSPAFGSSGNPSPVTAYGVYRGMKAAAKEVYGTDSLGGKTIAIQGVGNVAFNLCRHLHEEGAKLIVTDINQDALRRAEEAFGALVVGPDEIYGVEADIFAPCALGATLNDETIPQLKVKIIAGAANNQLKEDRHGDMLQERGILYAPDFVINAGGVINVADELDGYNRERAMKKVELVYDAVSKVIEIAKRDHLPTYRAAEKMAEERIATMGSARSQFLRRDKNILGSRG

SEQ ID NO: 325 - protein, 386 aa, Unknown
  Streptomyces sp. CB03911
MTDVQTASATHPAPGVLSRIFRTEQDGAPGDGHEQVVLCHDRSSGLKAIIAIHSTALGPALGGTRFFPYLTEEEALEDALRLSRGMSYKNALAGLDLGGGKAVIIGDPGKDKNEAMLRAYGRFVESLRGRYVTACDVGTYVQDMDVIARETTFVTGRSPEHGGAGDSSILTAFGVFQGMRASAQARWGQPTLRGRRVGVSGVGKVGHYLVGHLVADGAHVVVTDVSEAAVNRVRAAHPDVEVVADTAALLAAALDVYAPCALGGALDDHTVGALGAAGTSLVCGAANNQLAHPGVEKDLADRGILYAPDYLVNSGGVIQVADEIQGFNFERAKNKATKIFDTTLEIFTRATADGVPPAVAADRLAEKRMREISSLRTILLPGARGN

SEQ ID NO: 326 - protein, 366 aa, Artificial Sequence
  Synthetic polypeptide
MTLEIFEYLEKYDYEQVVFCQDKESGLKAIIAIHDTTLGPALGGTRMWTYDSEEAAIEDALRLAKGMTYKNAAAGLNLGGAKTVIIGDPRKDKSEAMFRALGRYIQGLNGRYITAEDVGTTVDDMDIIHEETDFVTGISPSFGSSGNPSPVTAYGVYRGMKAAAKEAFGTDNLEGKVIAVQGVGNVAYHLCKHLHAEGAKLIVTDINKEAVQRAVEEFGASAVEPNEIYGVECDIYAPCALGATVNDETIPQLKAKVIAGSANNQLKEDRHGDIIHEMGIVYAPDYVINAGGVINVADENYGYNRERALKRVESIYDTIAKVIEISKRDGIATYVAADRLAEERIASLKNSRSTYLRNGHDIISRR

SEQ ID NO: 327 - protein, 365 aa, Bacillus loiseleuriae
MEIFTYLEKYDYEQLLFCQDKQSGLKAIIAIHDTTLGPALGGTRMWTYESEEAAIEDALRLAKGMTYKNAAAGLNLGGGKTVIIGDPRKDKNDEMFRAFGRYIQGLNGRYITAEDVGTTVADMDLIHEETDFVTGISPAFGSSGNPSPVTAFGVYQGMKAAAKEAFGTDSLEGKTVAVQGIGNVAFTLLQYLHEEGAKLIVTDINKEAVQRAVEKFGARAVNTDEIYGVECDIYAPCALGAVINDQTISQIKAKVIAGSANNQLKDPRHGDQIHEMGIVYAPDYVINAGGVINVADELYGYNRERAMKKVEGVYNTIEKVIEIAKRDGIPTYLAADRMAEERIKRMRNSRSQFLQNEKHILNRRK

SEQ ID NO: 328 - protein, 365 aa, Brochothrix campestris
MLFETMVQDGYEQVVFCHDKASGLKAIIAIHDTTLGPALGGCRMWPYATEEEALHDVLRLSRGMTYKNAAAGLNIGGGKTVIIGDPRTDKSETLFRALGRYVESLNGRYIIAEDVGTTEDDMNFIYNETNYVTGSTAGAGSSGNPSPKTALGIYYAMKRTAKEVFGSDSLADKKVSVQGVGNVSYTLCELLHAEGAKLIVTDINEVAVARAVTNLNATAVGIDEIYDVDADIFAPCALGAILNDDTIQRLRVKAICGSANNQLMDLEKHGQMLEARGILYAPDYIVNSGGVINVADELSGYNEARAIKQVKEIYNQIGKVFEIAKTKNIIPAIAADELAEQRIAQVKAMRSNFLQTEHSSISRKS

SEQ ID NO: 329 - protein, 357 aa, Acetonema longum
MGIFEKMEQHGYEQLVFCHDPASGLKAIICIHDTTLGPALGGTRMWPYECEEDAITDVVRLARGMTYKNAAAGLNLGGGKAVIIGNSRTDKSEALFRAFGRFVQSLNGRYITAEDVGTTVEDMEHIRMETSHVVGLGGMARSSGDPSPVTAYGVWKGMKACAAEVWGTDSLRAKTVAVQGLGHVGYGLCRHLYEEGANLIVTDINEENVRRVVAEFGARSAAPDEIYGVECDIFAPCALGAIINDATLPRLKCRIVAGAANNQLKEARHGELLRDKKILYAPDFIINAGGVINVSDELREGGYNRERALKQVDGIYDIMEQVIAISKRDGIPTYKAADILAESRVALIGKVQKTLLP

SEQ ID NO: 330 - protein, 378 aa, Streptomyces rubidus
MGVTTVTDVRQTSPSNEGVLAKLFRSEQGGHEQVVLCQDRATGLKAVIAVHSTALGPALGGTRFFPYASDEEAVDDALNLARGMSYKNALAGLDLGGGKAVIIGDPDTLKSEELLLAYGRFVASLGGRYVTACDVGTYVSDMDVIARENRWTTGRSPQNGGAGDSSVLTAFGVFQGMRAAAQAQWGESTLKGRRVGVAGVGKVGHHLVEHLVEDGAEVVITDVRAEAVERIIARHPDVTAVHDAEVLVRSPLDVYAPCALGHALDDATVGALTATVVCGAANNQLAHPGVEKDLADRGILYAPDYVVNAGGVIQVADELHGFDFDRAKAKATKIFDTTLAIFARAKADGVPPAVAADRLAEQRMAERTPAADWLRVQS

SEQ ID NO: 331 - protein, 366 aa, Artificial Sequence
  Synthetic polypeptide
MTLEIFEYLEKYDYEQVVFCQDKESGLKAIIAIHDTTLGPATGGTRMWTYDSEEAAIEDALRLAKGMTYKNAAAGLNLGGAKTVIIGDPRKDKSEAMFRALGRYIQGLNGRYITAEDVGTTVDDMDIIHEETDFVTGISPSFGSSGNPSPVTAYGVYRGMKAAAKEAFGTDNLEGKVIAVQGVGNVAYHLCKHLHAEGAKLIVTDINKEAVQRAVEEFGASAVEPNEIYGVECDIYAPCALGATVNDETIPQLKAKVIAGSANNQLKEDRHGDIIHEMGIVYAPDYVINAGGVINVADELYGYNRERALKRVESIYDTIAKVIEISKRDGIATYVAADRLAEERIASLKNSRSTYLRNGHDIISRR

SEQ ID NO: 332 - protein, 369 aa, Halobacteriovorax marinus
MMSFERLYKDGHEEVIFFSDPSCNLKAIVAIHNTTLGPALGGTRMWPYASEEEAINDVLRLSKGMTYKAAVSGLNLGGGKAVIIGDPEKDKSEALFRSYGRFLESLNGRYITAEDVNIGVQDIEHVFTETGNVCGVAKIHGGSGNPSPYTAKGVFRGIEAACMKVYGDRSPKGKTVALQGAGSVGRYLAKFLDEAGAKVVVCDINERNIQLLKEAVPAVEVVGVNDIYDVDCDIYAPCALGATVNDDTIDRLKCKIVAGAANNQLAEDRHGEILRQKGILYAPDYLINAGGLMNVSIEFEGWSDSKSSRMVDTIYDTTLKIFAISDEQDIPVNKAADVLAESRIESIRNINGKYLGNLGHRFPGRKTRN

SEQ ID NO: 333 - protein, 365 aa, Unknown
  Bacillus sp. FJAT-27916
MELFKYMEQYDYEQLLFVQDRQSGLKAIIAIHDTTLGPALGGTRMWTYESEDAAIEDALRLAKGMTYKNAAAGLNLGGGKTVIIGDPRKDKNEEMFRAFGRYIQGLNGRYITAEDVGTTVADMDIIHEETDYVTGISPAFGSSGNPSPVTAFGVYRGMKAAAKEAFGTDSLEGKVIAVQGVGNVAFNLCKHLHEEGAQLIVTDINKDSVQMAVEQFGAKAVDPNEIYGVDCDIYAPCALGATINDYTIPQLKAKVIAGAANNQLKETRHGDAIHEMGIVYAPDYVINAGGVINVADELYGYNQERALKKVELIYNNIERVIEIAKRDGIPTYMAADRMAEERIEKLKNSRSQFLMNGRHILNRRR

SEQ ID NO: 334 - protein, 366 aa, Artificial Sequence
  Synthetic polypeptide
MTLEIFEYLEKYDYEQVVFCQDKESGLKAIIAIHDTTLGPALGGTRMWTYDSEEAAIEDALRLAKGMTYKNAAAGLNLGGAKTVIIGDPRKDKSEAMFRALGRYIQGLNGRYITAEDVGTTVDDMDIIHEETDFVTGISPSFGSSGNPSPVTAYGVYRGMKAAAKEAFGTDNLEGKVIAVQGVGNVAYHLCKHLHAEGAKLIVTDINKEAVQRAVEEFGASAVEPNEIYGVECDIYAPCALGATVNDETIPQLKAKVIAGSANNQLKEDRHGDIIHEMGIVYAPDYVINAGGVINNADELYGYNRERALKRVESIYDTIAKVIEISKRDGIATYVAADRLAEERIASLKNSRSTYLRNGHDIISRR

SEQ ID NO: 335 - protein, 372 aa, Bdellovibrionales bacterium
MPTLEKMYSMGHEEVVFYADPTCNLRAIVAIHNTILGPALGGTRMWPYKSEDEALEDVLRLSKGMTYKASVSGLNLGGGKAVIIGDPEKDKSEALFRSFGRLVESLNGRYITAEDVNIKVEDIEHIFTETNNVCGVAIPHGGSGNPAPYTALGVFKGIEASCLKLYGDRSVKGKVVALQGAGFVGRHLGELLSQAGAKVYVADINEKNIKLFLEMVPNAEVVAADAIYGVKCDIYAPCALGATVNDQTVEKLKCKIVAGAANNQLAEPRHGDILRSRGILYAPDYLINAGGLMNVSIEFEGWSDSKARRMVDTIYDTTLEIFRIADKNNITTYKAADMWAENRIESIRRIGSRYMGVSQHRFPGRKRRNPNG

SEQ ID NO: 336 - protein, 366 aa, Artificial Sequence
  Synthetic polypeptide
MTLEIFEYLEKYDYEQVVFCQDKESGLKAIIAIHDTTLGPALGGTRMWTYDSEEAAIEDALRLAKGMTYKNAAAGLNKGGAKTVIIGDPRKDKSEAMFRALGRYIQGLNGRYITAEDVGTTVDDMDIIHEETDFVTGISPSFGSSGNPSPVTAYGVYRGMKAAAKEAFGTDNLEGKVIAVQGVGNVAYHLCKHLHAEGAKLIVTDINKEAVQRAVEEFGASAVEPNEIYGVECDIYAPCALGATVNDETIPQLKAKVIAGSANNQLKEDRHGDIIHEMGIVYAPDYVINAGGVINVADELYGYNRERALKRVESIYDTIAKVIEISKRDGIATYVAADRLAEERIASLKNSRSTYLRNGHDIISRR

SEQ ID NO: 337 - protein, 366 aa, Artificial Sequence
  Synthetic polypeptide
MTLEIFEYLEKYDYEQVVFCQDKESGLKAIIAIHDTTLGPALGGTRMWTYDSEEAAIEDALRLAKGMTYKNAAAGLNLGGAKTVIIGDPRKDKSEAMFRALGRYIQGLNGRYITAEDVGTTVDDMDIIHEETDFVSGISPSFGSSGNPSPVTAYGVYRGMKAAAKEAFGTDNLEGKVIAVQGVGNVAYHLCKHLHAEGAKLIVTDINKEAVQRAVEEFGASAVEPNEIYGVECDIYAPCALGATVNDETIPQLKAKVIAGSANNQLKEDRHGDIIHEMGIVYAPDYVINAGGVINVADELYGYNRERALKRVESIYDTIAKVIEISKRDGIATYVAADRLAEERIASLKNSRSTYLRNGHDIISRR

SEQ ID NO: 338 - protein, 345 aa, Colwellia psychrerythraea
MALFDLPDFDDHEQVVYCSDEASGLKAIIAIHSTKLGAAVGGCRMWDYADDDEALVDVLRLSKGMTYKNAMAGLSMGGGKSVIIGDAKKLKSKALFKAFGEALNRLNGRYLSAEDVNITTSDIDITNSVTPFVTGTEGKSGNPAPFTALGTFLGIKASVKHKLNRDDLTGLKVAIQGLGSVGYQLCDHLHQAGAELVITDINQTALDMAATEFNATIVGLDEIYDQEVDIYAPCALGATINDDTLNRLKASIIAGCANNQLAEPRHDQALVERGILYAPDYVINAGGIINISFEHNYDCEKATEKVGDIYHTLLDIYAKADAQNRPTGIIADEMAREIIKNGGKA

SEQ ID NO: 339 - protein, 366 aa, Artificial Sequence
  Synthetic polypeptide
MTLEIFEYLEKYDYEQVVFCQDKESGLKAIIAIHDTTLGPALGGTRMWTYDSEEAAIEDALRLAKGMTYKNAAAGLNLGGAKTVIIGDPRKDKSEAMFRALGRYIQGLNGRYITAEDVGTTVDDMDIIHEETDFVFGISPSFGSSGNPSPVTAYGVYRGMKAAAKEAFGTDNLEGKVIAVQGVGNVAYHLCKHLHAEGAKLIVTDINKEAVQRAVEEFGASAVEPNEIYGVECDIYAPCALGATVNDETIPQLKAKVIAGSANNQLKEDRHGDIIHEMGIVYAPDYVINAGGVINVADELYGYNRERALKRVESIYDTIAKVIEISKRDGIATYVAADRLAEERIASLKNSRSTYLRNGHDIISRR

SEQ ID NO: 340 - protein, 364 aa, Unknown
  Bacillus sp. 1NLA3E
MGIFENLEIYDYEQLVFCQDKQSGLKAIIAIHDTTLGPALGGTRMWTYSSEDDAIEDALRLARGMTYKNAAAGLNLGGGKTVIIGDPRRDKNEEMFRAFGRYIQGLNGRYITAEDVGTTVADMDLIHEETDFVTGISPAFGSSGNPSPATAYGVYRGMKAAAKEAFGTDSLEGKVVAIQGVGNVAINLCKHLRGEGAELIVTDIHKESVQRAIDEFGAKAVEPDEIYGVVCDIYAPCALGAVINDETIPRLKAKVIAGSANNQLKETKHGDMIHELGIVYAPDYVINAGGVINVADELYGYNRERALKKVEGIYQTINKVIEISKRDQIPTYLAADRLAEERIARIRNSRSQFLLNGHHILSRR

SEQ ID NO: 341 - protein, 366 aa, Artificial Sequence
  Synthetic polypeptide
MTLEIFEYLEKYDYEQVVFCQDKESGLKAIIAIHDTTLGPALGGTRMWTYDSEEAAIEDALRLAKGQTYKNAAAGLNLGGAKTVIIGDPRKDKSEAMFRALGRYIQGLNGRYITAEDVGTTVDDMDIIHEETDFVTGISPSFGSSGNPSPVTAYGVYRGMKAAAKEAFGTDNLEGKVIAVQGVGNVAYHLCKHLHAEGAKLIVTDINKEAVQRAVEEFGASAVEPNEIYGVECDIYAPCALGATVNDETIPQLKAKVIAGSANNQLKEDRHGDIIHEMGIVYAPDYVINAGGVINVADELYGYNRERALKRVESIYDTIAKVIEISKRDGIATYVAADRLAEERIASLKNSRSTYLRNGHDIISRR

SEQ ID NO: 342 - protein, 373 aa, Unknown
  Exiguobacterium sp.
MMETNTEPRFRIFDVLQSEDYEQIVFCQDQASGLKAIIAIHDTTLGPALGGLRMWNYESEQEALTDVLRLAKGMTYKNAAAGLNLGGGKAVIIGNAKTDKSEALFRAFGRYVQSLSGRYITAEDVNTTVADMDFIHMETDYVTGVSPAFGSSGNPSPVTAYGVYRGMKAAAKWKFGTDSLAGKTVAVQGVGNVAYNLCRHLHEEGAHLIVTDINEEALKRAEADFGATVVKPDEIYAVECDIFAPCALGAVINDKTIPQLKAQIVAGAANNQLAEDRHGDVLDENGILYAPDFVINAGGVINVADELEGYNRERAMKKVELIYDNMMRVFEIAERDGVPTHVAADKMAEERIHMMSRSRSQFLKVEKSILGRR

SEQ ID NO: 343 - protein, 366 aa, Marininema halotolerans
MQLFDYLSKYDYEQLIFCQDENSGLKAIIAIHDTTLGPALGGTRMWTYASEEDAIVDALRLARGMTYKNAAAGLNLGGGKTVIIGDPKTDKNEAMFRAFGRFIQGLNGRYITAEDVGTTVEDMDLIHEETRFVTGISPEFGSSGNPSPVTAYGCYMGMKAAAKEAFGDDSLEGRTVAVQGVGSVAYHLCKYLHDEGAKLIVTDINQENLARAVNDFDAQTVDPDSIYDVDCDIFSPCALGAVINDDTVNRLKCKVIAGSANNQLKDNEHGDILQEKGIFYAPDYVINSGGVINVADELIGYNRERAMRRVEGIYGTILRVFEIAKRDRIPSYLAADRMAEERIASIRQSRSPFLQNERNIINMTLR

SEQ ID NO: 344 - protein, 366 aa, Artificial Sequence
  Synthetic polypeptide
MTLEIFEYLEKYDYEQVVFCQDKESGLKAIIAIHDTTLGPALGGTRMWTYDSEEAAIEDALRLAKGMTYKNAAAGLNLGGAKTVIIGDPRKDKSEAMFRALGRYIQGLNGRYITAEDVGTTVDDMDIIHEETDFVTGISPSFGSSGNPSPVTAYGVYRGMKAAAKEAFGTDNLEGKVIAVQGVGNVAYHLCKHLHAEGAKLIVTDINKEAVQRAVEEFGASAVEPNEIYGVECDIYAPCALGATVNDETIPQLKAKVIAGSANNQLKEDRHGDIIHEMGIVYAPDYVINAGGVINVRDELYGYNRERALKRVESIYDTIAKVIEISKRDGIATYVAADRLAEERIASLKNSRSTYLRNGHDIISRR

SEQ ID NO: 345 - protein, 375 aa, Streptacidiphilus jiangxiensis
MTDVSERSGVLSRIFATDPNAAPGDSHEQVVLCHDRDTGLKAVIAIHSTALGPALGGTRFHPYATEEEAVQDALNLSRGMSYKNAMAGLDLGGGKAVIIGDPTKIKTEALLRAYGRFVQSLNGRYVTACDVGTYVADMDVIARECDFVTGRSPEYGGAGDSSVLTSFGVFQGMRAAAQHKWGSPSLEGRRVGVAGIGKVGHYLVEHLIEDGAQVVITDVREDAVNRVRAAHPGVEVAADTDALIRANLDVYAPCALGGALNDETVPALTAKIVAGAANNQLAHPGVEKDLADRGILYAPDYVINAGGVIQVADEIEGFNFDRAKAKASKIFDTTLEIFALADSDGVPPAVAADRLAERRMAEVGRLRTILLPRSR

SEQ ID NO: 346 - protein, 353 aa, Tissierella creatinophila
MNIFDYLKEYDYEQVVFCQDKHSGLKAIIGIHDTTLGPALGGTRIWDYKSEEEAIIDVLRLARGMTYKNAAAGLNLGGGKAVIIGDPEKIKSEELFRTFGRFVESLGGRYITAEDMNAGTKDMAYINEETNYVVGLEGKSGNPSPVTAFGVFKGILAAVDEVYGSEGLKGKTVAVQGLGAVGYGLCEYLHKAGAKLLVTDIRKDSIEKIVNEFGAKSVNPDDIYGVDCDIFAPCAMGAIINDFTIDKLKCKIVAGCANNQLAEEKHGDMLMEKEILYIPDYVINSGGVINVYEELKGYNKERAMDRAAGIYDSVKKIIEISKRDNIPTYKAANRMAEERIAAIGRVKKMYLKK

SEQ ID NO: 347 - protein, 366 aa, Artificial Sequence
  Synthetic polypeptide
MTLEIFEYLEKYDYEQVVFCQDKESGLKAIIAIHDTTLGPALGGTRMWTYDSEEAAIEDALRLAKGMTYKNAAAGLNLGGAKTVIIGDPRKDKSEAMFRALGRYIQGLNGRYITAEDVGTTVDDMDIIHEETDFVTGISPSFGSSGNPSPVTAYGVYRGMKAAAKEAFGTDNLEGKVIAVQGVGNVAYHLCKHLHAEGAKLIVTDINKEAVQRAVEEFGASAVEPNEIYGVECDIYAPCALGATVNDETIPQLKAKVIAGSANNQLKEDRHGDIIHEMGIVYAPDYVINAGGVINVADEQYGYNRERALKRVESIYDTIAKVIEISKRDGIATYVAADRLAEERIASLKNSRSTYLRNGHDIISRR

SEQ ID NO: 348 - protein, 344 aa, Shewanella amazonensis
MAVFNHVSYDEHEQVVFCHDKESGLKAIIAVHNTNLGPAVGGCRMWNYQSDEEALNDVLRLSRGMTYKNALAGLTMGGGKSVIIADPKTQDREALFRAFGRFINTLGGKYYSAEDVGTTTADIMIAHQETPYMAGLEGKSGDPSPFTALGTFLGIKAAVKHQRGLDSLKGLKIAVQGVGHVGYYLCKHLHEEGAELIVTDIHQASLDKVATEFGAAVVAPQDIYSQDVDIYAPCALGATINDATLPLLKAKIVAGCANNQLAEPRHGQMLKDMGILYAPDYVINAGGIINVSFENDYDAARSTAKVEKIYDTLLTIFTAADEQNRTTGAVADEMARAIIDAARK

SEQ ID NO: 349 - protein, 366 aa, Artificial Sequence
  Synthetic polypeptide
MTLEIFEYLEKYDYEQVVFCQDKESGLKAIIAIHDTTLGPALGGTRMWTYDSEEAAIEDALRLAKGMTYKNAAAGLNLGGAKTVIIGDPRKDKSEAMFRALGRYIQGLNGRYITAEDVGTTVDDMDIIHEETDFVTGISPSFGSSGNPSPVTAYGVYRGMKAAAKEAFGTDNLEGKVIAVQGVGNVAYHLCKHLHAEGAKLIVTDINKEAVQRAVEEFGASAVEPNEIYGVECDIYAPCALGATVNDETIPQLKAKVIAGSANNQLKEDRHGDIIHEMGIVYAPDYVINAGGSINVADELYGYNRERALKRVESIYDTIAKVIEISKRDGIATYVAADRLAEERIASLKNSRSTYLRNGHDIISRR

SEQ ID NO: 350 - protein, 358 aa, Gemmatimonas aurantiaca
MQHFEVIAEMGHEQVVFCHDKASGYRGIIAIHDTTLGPALGGTRFWNYATDEDAFIDALRLSRGMTYKNAVAGLNLGGGKAVIIGDNKTPHREMLFRAHGRFCDSLGGRYVTAEDVGTTVEDMDFVHMETTHVAGIGSKSGDPSSVTAHGVFRAIEASAHARWGSNSLEGRTIALQGLGHVGTHLAKELHAAGAQLVVTDIDAGRIAHVVDTCGARAVALNEIYGVKADIFTPCALGGVINDDTIPQLQVEIVAGAANNQLLEDRHGDELERRGILYAPDYVANAGGVINVYSELTGWSRDRALRKADEIYETVLSVFRMAKSTGIPTYQAADRVAEQRINAVRGMIRTWPQYPNKET

SEQ ID NO: 351 - protein, 357 aa, Legionella erythra
MMSVDTMKINEPTTRQDDFLDYALSHGFGDIHFKVDSKTGMKAIIAIHSTKLGPALGGCRFIEYPSTENAINDAMRLARGMSYKAASVNLPLGGGKAVVIKPHGPYDHEAYFHAFGEFVNDLGGRYITALDSGTQLSDMDIIAQHTPYVASLSSHNGDPSPSTAKGVFKGIEAAVHFKLGKDNLKGLHIAIQGLGHVGYLLARHLHEAGARLTVADVNKEAVERAVNEFGAAAISTDTIHKVPCDVFSPCALGAILNDMTINQLQTTIVAGAANNQLAHTYHGKILHDKGIVYAADYVINAGGLIFAASKYLNTPEEQVVKQINSIGTSLMEIFVRSQKENRPASEIADTLAQEKLA

SEQ ID NO: 352 - protein, 366 aa, Artificial Sequence
  Synthetic polypeptide
MTLEIFEYLEKYDYEQVVFCQDKESGLKAIIAIHDTTLGPALGGTRMWTYDSEEAAIEDALRLAKGMTYKNAAAGLNLGGAKTVIIGDPRKDKSEAMFRALGRYIQGLNGRYFTAEDVGTTVDDMDIIHEETDFVTGISPSFGSSGNPSPVTAYGVYRGMKAAAKEAFGTDNLEGKVIAVQGVGNVAYHLCKHLHAEGAKLIVTDINKEAVQRAVEEFGASAVEPNEIYGVECDIYAPCALGATVNDETIPQLKAKVIAGSANNQLKEDRHGDIIHEMGIVYAPDYVINAGGVINVADELYGYNRERALKRVESIYDTIAKVIEISKRDGIATYVAADRLAEERIASLKNSRSTYLRNGHDIISRR

SEQ ID NO: 353 - protein, 366 aa, Artificial Sequence
  Synthetic polypeptide
MTLEIFEYLEKYDYEQVVFCQDKESGLKAIIAIHDTTLGPALGGTRMWTYDSEEAAIEDALRLAKGETYKNAAAGLNLGGAKTVIIGDPRKDKSEAMFRALGRYIQGLNGRYITAEDVGTTVDDMDIIHEETDFVTGISPSFGSSGNPSPVTAYGVYRGMKAAAKEAFGTDNLEGKVIAVQGVGNVAYHLCKHLHAEGAKLIVTDINKEAVQRAVEEFGASAVEPNEIYGVECDIYAPCALGATVNDETIPQLKAKVIAGSANNQLKEDRHGDIIHEMGIVYAPDYVINAGGVINVADELYGYNRERALKRVESIYDTIAKVIEISKRDGIATYVAADRLAEERIASLKNSRSTYLRNGHDIISRR

SEQ ID NO: 354 - protein, 358 aa, Nesiotobacter exalbescens
MNAPLAQAVALEDTSTAFDHPEFSGHEQVVFAHDPASGLRAIIAIHNTRLGPALGGCRMWGYRTSREALTDALRLSKGMTYKNALAGLPLGGGKSVIIADPKTEKTPELLKAFGRHVERLAGGYITAEDVGITAADMELIASQTGHARGTEATGLGDPSPYTALGVFTGIQAAVAHKFGTSHLTGITVSVQGLGNVGYGVCRYLHAHGAKLVVSDIHEPNVKRAVAEFGAQPIDPHQAHAADVDVYAPCALGATINAATIPQIKAKIIAGAANNQLQTPEDGVKLMQRGILYAPDYALNAGGVISVALATSSKDDAMVREKTLAIGDTLTAIFKRADLEGLPTSVVADKLAEERLMAG

SEQ ID NO: 355 - protein, 366 aa, Artificial Sequence
  Synthetic polypeptide
MTLEIFEYLEKYDYEQVVFCQDKESGLKAIIAIHDTTLGPALGGTRMWTYDSEEAAIEDALRLAKGMTYKNAAAGLNLGGAKTVIIGDPRKDKSEAMFRALGRYIQGLNGRYITAEDVGTTVDDMDIIHEETDFVTGISPSFGSSGNPSPVTAYGVYRGMKAAAKEAFGTDNLEGKVIAVQGVGNVAYHLCKHLHAEGAKLIVTDINKEAVQRAVEEFGASAVEPNEIYGVECDIYAPCALGATVNDETIPQLKAKVIAGSANNQLKEDRHGDIIHEMGIVYAPDYVINAGGVINVADEAYGYNRERALKRVESIYDTIAKVIEISKRDGIATYVAADRLAEERIASLKNSRSTYLRNGHDIISRR

SEQ ID NO: 356 - protein, 366 aa, Artificial Sequence
  Synthetic polypeptide
MTLEIFEYLEKYDYEQVVFCQDKESGLKAIIAIHDTTLGPALGGTRMWTYDSEEAAIEDALRLAKGMTYKNAAAGLNLGGAKTVIIGDPRKDKSEAMFRALGRYIQGLNGRYITASDVGTTVDDMDIIHEETDFVTGISPSFGSSGNPSPVTAYGVYRGMKAAAKEAFGTDNLEGKVIAVQGVGNVAYHLCKHLHAEGAKLIVTDINKEAVQRAVEEFGASAVEPNEIYGVECDIYAPCALGATVNDETIPQLKAKVIAGSANNQLKEDRHGDIIHEMGIVYAPDYVINAGGVINVADELYGYNRERALKRVESIYDTIAKVIEISKRDGIATYVAADRLAEERIASLKNSRSTYLRNGHDIISRR

SEQ ID NO: 357 - protein, 366 aa, Artificial Sequence
  Synthetic polypeptide
MTLEIFEYLEKYDYEQVVFCQDKESGLKAIIAIHDTTLGPALFGTRMWTYDSEEAAIEDALRLAKGMTYKNAAAGLNLGGAKTVIIGDPRKDKSEAMFRALGRYIQGLNGRYITAEDVGTTVDDMDIIHEETDFVTGISPSFGSSGNPSPVTAYGVYRGMKAAAKEAFGTDNLEGKVIAVQGVGNVAYHLCKHLHAEGAKLIVTDINKEAVQRAVEEFGASAVEPNEIYGVECDIYAPCALGATVNDETIPQLKAKVIAGSANNQLKEDRHGDIIHEMGIVYAPDYVINAGGVINVADELYGYNRERALKRVESIYDTIAKVIEISKRDGIATYVAADRLAEERIASLKNSRSTYLRNGHDIISRR

SEQ ID NO: 358 - protein, 366 aa, Artificial Sequence
  Synthetic polypeptide
MTLEIFEYLEKYDYEQVVFCQDKESGLKAIIAIHDTTLGPALGGTRMWTYDSEEAAIEDALRLAKGMTYKNAAAGLNLGGAKTVIIGDPRKDKSEAMFRALGRYIQGLNGRYITAEDVGTTVDDMDIIHEETDFVTGISPSFGSSGNPSPVTAYGVYRGMKAAAKEAFGTDNLEGKVIAVQGVGNVAYHLCKHLHAEGAKLIVTDINKEAVQRAVEEFGASAVEPNEIYGVECDIYAPCALGATVNDETIPQLKAKVIAGSANNQLKEDRHGDIIHEMGIVYAPDYVINAGGVINVFDELYGYNRERALKRVESIYDTIAKVIEISKRDGIATYVAADRLAEERIASLKNSRSTYLRNGHDIISRR

SEQ ID NO: 359 - protein, 367 aa, Anoxybacillus flavithermus
MEIFKYMEQYDYEQLVFCQDKESGLKAIIAIHDTTLGPALGGTRMWMYESEDAAIEDALRLARGMTYKNAAAGLNLGGGKAVIIGDPRKDKNEAMFRAFGRFIQGLNGRYITAEDVGTTVADMDIIYEETDYVTGISPAFGSSGNPSPVTAYGVYRGMKAAAKEAFGSDSLEGKVVAVQGVGNVAYNLCRHLHEEGAKLIVTDINKEAVQRVVEQFGATAVDPNDIYGVDCDIFAPCALGGIINDQTIPQLKAKVIAGAANNQLREARHGDIIHEMGIVYAPDYVINAGGVINVADELYGYNRERAMKKVEQIYNNIEKVIEIAKRDGIPTYQAADRLAEERIAKMRQSRSQFLQNGQHILSRRRTR

SEQ ID NO: 360 - protein, 366 aa, Artificial Sequence
  Synthetic polypeptide
MTLEIFEYLEKYDYEQVVFCQDKESGLKAIIAIHDTTLGPALGGTRMWTYDSEEAAIEDALRLAKGMTYKNAAAGLNLGGAKTVIIGDPRKDKSEAMFRALGRYIQGLNGRYITAEDVGTTVDDMDIIHEETDFVTGISPSFGSSGNPSPVTAYGVYRGMKAAAKEAFGTDNLEGKVIAVQGVGNVAYHLCKHLHAEGAKLIVTDINKEAVQRAVEEFGASAVEPNEIYGVECDIYAPCALGATVNDETIPQLKAKVIAGSANNQLKEDRHGDIIHEMGIVYAPDYVINAGGVINVADECYGYNRERALKRVESIYDTIAKVIEISKRDGIATYVAADRLAEERIASLKNSRSTYLRNGHDIISRR

SEQ ID NO: 361 - protein, 366 aa, Artificial Sequence
  Synthetic polypeptide
MTLEIFEYLEKYDYEQVVFCQDKESGLKAIIAIHDTTLGPALGGTRMWTYDSEEAAIEDALRLAKGMTYKNAAAGLNLGGAKTVIIGDPRKDKSEAMFRALGRYIQGLNGRYITAEDVGTTVDDMDIIHEETDFVTGISPSFGSSGNPSPVTAYGVYRGMKAAAKEAFGTDNLEGKVIAVQGVGNVAYHLCKHLHAEGAKLIVTDINKEAVQRAVEEFGASAVEPNEIYGVECDIYAPCALGATVNDETIPQLKAKVIAGSANNQLKEDRHGDIIHEMGIVYAPDYVINAGGVINVADEFYGYNRERALKRVESIYDTIAKVIEISKRDGIATYVAADRLAEERIASLKNSRSTYLRNGHDIISRR

SEQ ID NO: 362 - protein, 367 aa, Xanthomarina gelatinilytica
MVTDVINANELHKADPVFGQLSFDNHEQVVFCNDKDTGLKAIIGIHNTVLGPALGGTRMWNYTNEWEALNDVLRLSRGMTYKSAITGLNLGGGKAVIIGDAKTQKTPELMKKFGEFVHSLSGRYITAEDVGMETADMDLVRQVTPYVTGISEELGGAGNPSPITAYGVFMGMKAAAKFKFGSDVLEDKTVFVQGIGNVGEALVEHLVDEGAKVTIADINQERLEAIRKKYGVTIYGGSDLYSEDMDIYAPCALGATINDDTIYKLKAKVIAGAANNQLAVEEKHGKILQERDIVYAPDFLINAGGIINVYAELEGYDRKEIMRKTENIYNTTLEILSNAKTHNITTNHAALNIAQNRIDTRKKENKR

SEQ ID NO: 363 - protein, 366 aa, Artificial Sequence
  Synthetic polypeptide
MTLEIFEYLEKYDYEQVVFCQDKESGLKAIIAIHDTTLGPALGGTRMWTYDSEEAAIEDALRLAKGMTYKNAAAGLNFGGAKTVIIGDPRKDKSEAMFRALGRYIQGLNGRYITAEDVGTTVDDMDIIHEETDFVTGISPSFGSSGNPSPVTAYGVYRGMKAAAKEAFGTDNLEGKVIAVQGVGNVAYHLCKHLHAEGAKLIVTDINKEAVQRAVEEFGASAVEPNEIYGVECDIYAPCALGATVNDETIPQLKAKVIAGSANNQLKEDRHGDIIHEMGIVYAPDYVINAGGVINVADELYGYNRERALKRVESIYDTIAKVIEISKRDGIATYVAADRLAEERIASLKNSRSTYLRNGHDIISRR

SEQ ID NO: 364 - protein, 367 aa, Owenweeksia hongkongensis
MSDLTILNKSIDRGPVFNSEAFKGHEQLVFCQDEETGLKAIIGIHSTTLGPALGGTRMWNYENEADAIRDALRLSRGMTYKASISGLDLGGGKAVIIGDSRKDKTDALMRKFGEYVNSLSGRYITAEDVGINTHDMEMVKLETNHVTGIPEHMGGSGDPSPVTAYGVFMGMKASAQQKWGSDNLAGKKVLVQGIGHVGETLVKYLTDEGAIVTINDIHEDRIVEISAKYNTQVYRGNNLFEVEMDIYAPCALGATVNSKTIEMMKCDIIAGAANNQLEDEVVHGQMVKDKGILYAPDFLINAGGLINVYREIAGYDQAEAMRRTENIYDTTLRIFKLSQERNISTHEAALKIAEERVALKKAELANA

SEQ ID NO: 365 - protein, 353 aa, Unknown
  Marinobacter sp. HL-58
MTVFTHPEFDHHEHLTFCCDPETGLRAIIAVHNTSRGPALGGCRMFPYASDEEALRDVLRLSRGMTYKSALANLDLGGGKSVIIGDSREHKTEALLESMGRFLEQLGGLYIAAEDSGTSVADLKIMGRQTTHVAGIRDRPGFDGKPSNGDPSPATAWGTFVGIQAAVKHKLGRSDLEGLKVAVQGIGNVGYRLARHLREAGAELWVYDIHQDQMDRAVAEFGATPASAEDILFLPVDVVAPCAMGAVLNDASIARLQAPIVAGAANNQLASPAHDEVLWKHGVLYAPDFVINAGGIIDVFYERTGPDPEAVRQHVNTIGQTLEEIFQRSARDGLPTGQIADQLAEERFRHIPR

SEQ ID NO: 366 - protein, 364 aa, Unknown
  Paenisporosarcina sp. HGH0030
MEIFKYMETYDYEQLVFCQDKTSGLKAIIAIHDTTLGPALGGTRMWTYASEEAAIEDALRLAKGMTYKNAAAGLNLGGGKTVIIGDPLKDKNEEMFRAFGRFIQGLNGRYITAEDVGTTVADMDLIHEETNYVTGISPAFGSSGNPSPVTAYGVYRGMKAAAMEAFGSDSLEGKRIAVQGVGNVAYNLCRHLHEEGAKLIVTDINKAAVDRVVEEFGATAVNTDEIYSQDVDIFAPCALGAIINDETIPQLKAKVVAGAANNQLKETKHGDQLHELGIVYAPDYVINAGGVINVADELYGYNRERAMKRVETVYDNIAKVMEISRTQGIPTYVAADRLAEERIARVGKSRSNFLLNEKHILSGR

SEQ ID NO: 367 - protein, 364 aa, Ornithinibacillus halophilus
MEIFTYMEKYDYEQLVFCQDKNSGLKAIIAIHDTTLGPALGGTRMWTYDSEEEAIEDALRLAKGMTYKNAAAGLNLGGGKTVIIGDPRKDKNPEMFRAFGRYIQGLNGRYITAEDVGTTEEDMDLIHMETDFVTGVSEESGSSGNPSPVTAYGVYKGMKASAKEAFGSDSLEGKKVAVQGVGNVAFTLCKYLHEEGAKLIVTDINEDAVKRAVDAFGAEAVSPEEIYDVDCDIYAPCALGATINDETIPRIKAKVIAGSANNQLKSSKHGEIIHEKGIVYAPDYVINAGGVINVADELNGYNQERAMKKVETIYDSLSKVFEISRRDNIPSYVAADRMAEERIETMKKSRNQFLLNEHHILSRR

SEQ ID NO: 368 - protein, 366 aa, Artificial Sequence
  Synthetic polypeptide
MTLEIFEYLEKYDYEQVVFCQDKESGLKAIIAIHDTTLGPALGGTRMWTYDSEEAAIEDALRLAKGMTYKNAAAGENLGGAKTVIIGDPRKDKSEAMFRALGRYIQGLNGRYITAEDVGTTVDDMDIIHEETDFVTGISPSFGSSGNPSPVTAYGVYRGMKAAAKEAFGTDNLEGKVIAVQGVGNVAYHLCKHLHAEGAKLIVTDINKEAVQRAVEEFGASAVEPNEIYGVECDIYAPCALGATVNDETIPQLKAKVIAGSANNQLKEDRHGDIIHEMGIVYAPDYVINAGGVINVADELYGYNRERALKRVESIYDTIAKVIEISKRDGIATYVAADRLAEERIASLKNSRSTYLRNGHDIISRR

SEQ ID NO: 369 - protein, 368 aa, Flavobacterium micromati
MNAAFTTSNELQKMDPVFGQTSFDDHEQIVFCNDKDTGLKAIIGIHNSVMGPALGGTRMYNYSNEWEALNDVLRLSRGMTFKAAITGLNIGGGKAVIIGDPKTQKTPELMRKFGEFVHSLSGRYITAEDMGMETRDMDIVRDVTPYVTGISEERGGAGNPSPVTAYGVFMGMKAAAKRQFGSDNLSGKKVLVEGIGHVGETLVAYLVKEGAIVTIADINEQKLNEVAATYNTTIFRGEDLYAADVDIYAPCAMGATINNDTVYKIKAKVIAGAANNQLADENIHGAILQERGILYAPDFLINAGGIINVYAELAHYDKAEITRRTENIYDTTLEIFDFAIANKMTTHTAALTIAQNRINQRKIENSRR

SEQ ID NO: 370 - protein, 348 aa, Sandaracinus amylolyticus
MNVFEHLQQHDYGEVHFARDAATGLQAIVAIHDTRLGPALGGCRFIHYPHEELALIDALRLARGMTYKAAITGIPHGGGKSVIIRPPRAFDRGALFRAFGRFVDGLGGRYITAEDSGTSMEDMETIRSVTKHVTGVKPEHGGSGDPSPYTALGVRRGIEACVKFVYKRDSIEGLHVAVQGVGHVGYWLCKQLHDLGAKLTVADIDPLKAERAHRELGAEVVPLDQIFSVDCEVFAPCALGSALNDDSIPKLKCKIVAGAANNQLAETRHGDALMHRGILYAPDYAINAGGLVNVAQEHAGYDEQKSRERVLKIYDTILEIAERAERAMQPTYRIADTIVEEKLARAAR

SEQ ID NO: 371 - protein, 351 aa, Lacimicrobium alkaliphilum
MSVFDHAAYDKHEHVAFYHDVKSGLKAIIAVHNTNLGPSLGGCRMWPYASSAEALTDVLRLSKGMSYKSAMANLKLGGGKSVIIGDPRKHKSADMMLAMGDFVQSLGGKYISAEDSGISVSDLQTMAQRSDYIAGTQAKYRYDGGPADGNPAPSTAYGVFMGLKASVAYGLKSDLNGVSVAIQGLGHVGFRLAEHLHKEGAKLFVTDIYPDNLDKAVEQFGATVVTPDEIFGLDVDVFAPCALGAAINDQTIDQIKARVIAGAANNQLAEERHGQMLMDKGILYAPDYVINAGGVIDIYHQKQGSSAEALRKHIEGIGDTLTEIYQKAAQQGLPTNIEANRIAEQRFLAGA

SEQ ID NO: 372 - protein, 376 aa, Unknown
  Marinobacterium sp. AK27
MNAPINSTINQPLTDTNEQNKEPMNMSVFSHPEFDNHEQLTFFSDEKSGLKAIIAVHNTNLGPALGGCRMWHYASDEEALRDVLRLSRGMTYKSALANLKLGGGKSVIIGDPRQHKSEALLEMMGRCLERTGGQYIAAEDSGTSVPDLQVMSRFTNNVAGITERTGIDGLPCNGDPSPATAYGCFVGLKAAVKHQFGRDDLSGLKVAIQGVGNVGYRLAKHLRQAGAELFVTDIHEEQVRLAVTELGATAVAQEEILGLDVDVLSPCALGAVLNDFSIPQIKAKVIAGAANNQLALAKHDQLLQQRGILYAPDYVINAGGIIDIYYERVGHEHTKVRAHIDTIADTLQEIFRRADDSGRPTGEIANTLAEERFMTR

SEQ ID NO: 373 - protein, 349 aa, Unknown
  Thalassospira sp. TSL5-1
MSIFSDPAFDNHEQVVFASDRETGLKAIIAVHNTHLGPSLGGCRMWPYASEQDAIHDVLRLSRGMTYKSALVNLPLGGGKSVIIGDPRTQKTPELFRAVGRAVERLNGRYIVAEDVGTSPADMAEIARQTHHVGGINDGKDPARTGDPSPFTAYGVFIGLKEAVKHKTGNDDLKDMRVAVQGLGNVGFHLCELLHNAGAELIVADINASAVDRAVDRFGAKAVSVDEILSVNADVLAPCALGGIINDTSIASLKAGIIAGAANNQLEADRHGDILREMGVLYAPDYVINAGGVVEVHYCREGRPVSETNRHIEGIGATVREIFERADRENKSTSFIADRLAEERFGKKA

SEQ ID NO: 374 - protein, 366 aa, Artificial Sequence
  Synthetic polypeptide
MTLEIFEYLEKYDYEQVVFCQDKESGLKAIIAIHDTTLGPALGGTRMWTYDSEEAAIEDALRLAKGMTYKNAAAGLNLGGAKTVIIGDPRKDKSEAMFRALGRYIQGLNGRYITAEDVGTTVDDMDIIHEETDFVTGISPSFGSSGNPSPVTAYGVYRGMKAAAKEAFGTDNLEGKVIAVQGVGNVAYHLCKHLHAEGAKLIVTDINKEAVQRAVEEFGASAVEPNEIYGVECDIYAPCALGATVNDETIPQLKAKVIAGSANNQLKEDRHGDIIHEMGIVYAPDYVINAGGVINVDDELYGYNRERALKRVESIYDTIAKVIEISKRDGIATYVAADRLAEERIASLKNSRSTYLRNGHDIISRR

SEQ ID NO: 375 - protein, 366 aa, Artificial Sequence
  Synthetic polypeptide
MTLEIFEYLEKYDYEQVVFCQDKESGLKAIIAIHDTTLGPALGGTRMWTYDSEEAAIEDALRLAKGMTYKNAAAGLNLGGAKTVIIGDPRKDKSEAMFRALGRYIQGLNGRYITAEDVGTTVDDMDIIHEETDFVTGISPSFGSSGNPSPVTAYGVYRGMKAAAKEAFGTDNLEGKVIAVQGVGNVAYHLCKHLHAEGAKLIVTDINKEAVQRAVEEFGASAVEPNEIYGVECDIYAPCALGATVNDETIPQLKAKVIAGSANNQLKEDRHGDIIHEMGIVYAPDYVINAGGQINVADELYGYNRERALKRVESIYDTIAKVIEISKRDGIATYVAADRLAEERIASLKNSRSTYLRNGHDIISRR

SEQ ID NO: 376 - protein, 366 aa, Artificial Sequence
  Synthetic polypeptide
MTLEIFEYLEKYDYEQVVFCQDKESGLKAIIAIHDTTLGPALGGTRMWTYDSEEAAIEDALRLAKGMTYKNAAAGLNLGGAKTVIIGDPRKDKSEAMFRALGRYIQGLNGRYITAEDVGTTVDDMDIIHEETDFVEGISPSFGSSGNPSPVTAYGVYRGMKAAAKEAFGTDNLEGKVIAVQGVGNVAYHLCKHLHAEGAKLIVTDINKEAVQRAVEEFGASAVEPNEIYGVECDIYAPCALGATVNDETIPQLKAKVIAGSANNQLKEDRHGDIIHEMGIVYAPDYVINAGGVINVADELYGYNRERALKRVESIYDTIAKVIEISKRDGIATYVAADRLAEERIASLKNSRSTYLRNGHDIISRR

SEQ ID NO: 377 - protein, 366 aa, Artificial Sequence
  Synthetic polypeptide
MTLEIFEYLEKYDYEQVVFCQDKESGLKAIIAIHDTTLGPALGGTRMWTYDSEEAAIEDALRLAKGMTYKNAAAGLNLGGAKTVIIGDPRKDKSEAMFRALGRYIQGLNGRYITAEDVGTTVDDMDIIHEETDFVTGISPSFGSSGNPSPVTAYGVYRGMKAAAKEAFGTDNLEGKVIAVQGVGNVAYHLCKHLHAEGAKLIVTDINKEAVQRAVEEFGASAVEPNEIYGVECDIYAPCALGATVNDETIPQLKAKVIAGSANNQLKEDRHGDIIHEMGIVYAPDYVINAGGVINVADEDYGYNRERALKRVESIYDTIAKVIEISKRDGIATYVAADRLAEERIASLKNSRSTYLRNGHDIISRR

SEQ ID NO: 378 - protein, 366 aa, Artificial Sequence
  Synthetic polypeptide
MTLEIFEYLEKYDYEQVVFCQDKESGLKAIIAIHDTTLGPALGGTRMWTYDSEEAAIEDALRLAKGMTYKNAAAGLNLGGAKTVIIGDPRKDKSEAMFRALGRYIQGLNGRYITAEDVGTTVDDMDIIHEETDFVTGISPSFGSSGNPSPVTAYGVYRGMKAAAKEAFGTDNLEGKVIAVQGVGNVAYHLCKHLHAEGAKLIVTDINKEAVQRAVEEFGASAVEPNEIYGVECDIYAPCALGATVNDETIPQLKAKVIAGSANNQLKEDRHGDIIHEMGIVYAPDYVINAGGVINVADETYGYNRERALKRVESIYDTIAKVIEISKRDGIATYVAADRLAEERIASLKNSRSTYLRNGHDIISRR

SEQ ID NO: 379 - protein, 366 aa, Artificial Sequence
  Synthetic polypeptide
MTLEIFEYLEKYDYEQVVFCQDKESGLKAIIAIHDTTLGPALGGTRMWTYDSEEAAIEDALRLAKGMTYKNAAAGHNLGGAKTVIIGDPRKDKSEAMFRALGRYIQGLNGRYITAEDVGTTVDDMDIIHEETDFVTGISPSFGSSGNPSPVTAYGVYRGMKAAAKEAFGTDNLEGKVIAVQGVGNVAYHLCKHLHAEGAKLIVTDINKEAVQRAVEEFGASAVEPNEIYGVECDIYAPCALGATVNDETIPQLKAKVIAGSANNQLKEDRHGDIIHEMGIVYAPDYVINAGGVINVADELYGYNRERALKRVESIYDTIAKVIEISKRDGIATYVAADRLAEERIASLKNSRSTYLRNGHDIISRR

SEQ ID NO: 380 - protein, 366 aa, Artificial Sequence
  Synthetic polypeptide
MTLEIFEYLEKYDYEQVVFCQDKESGLKAIIAIHDTTLGPALGGTRMWTYDSEEAAIEDALRLAKGMTYKNAAAGWNLGGAKTVIIGDPRKDKSEAMFRALGRYIQGLNGRYITAEDVGTTVDDMDIIHEETDFVTGISPSFGSSGNPSPVTAYGVYRGMKAAAKEAFGTDNLEGKVIAVQGVGNVAYHLCKHLHAEGAKLIVTDINKEAVQRAVEEFGASAVEPNEIYGVECDIYAPCALGATVNDETIPQLKAKVIAGSANNQLKEDRHGDIIHEMGIVYAPDYVINAGGVINVADELYGYNRERALKRVESIYDTIAKVIEISKRDGIATYVAADRLAEERIASLKNSRSTYLRNGHDIISRR

SEQ ID NO: 381 - protein, 366 aa, Artificial Sequence
  Synthetic polypeptide
MTLEIFEYLEKYDYEQVVFCQDKESGLKAIIAIHDTTLGPALGGTRMWTYDSEEAAIEDALRLAKGMTYKNAAAGMNLGGAKTVIIGDPRKDKSEAMFRALGRYIQGLNGRYITAEDVGTTVDDMDIIHEETDFVTGISPSFGSSGNPSPVTAYGVYRGMKAAAKEAFGTDNLEGKVIAVQGVGNVAYHLCKHLHAEGAKLIVTDINKEAVQRAVEEFGASAVEPNEIYGVECDIYAPCALGATVNDETIPQLKAKVIAGSANNQLKEDRHGDIIHEMGIVYAPDYVINAGGVINVADELYGYNRERALKRVESIYDTIAKVIEISKRDGIATYVAADRLAEERIASLKNSRSTYLRNGHDIISRR

SEQ ID NO: 382 - protein, 366 aa, Artificial Sequence
  Synthetic polypeptide
MTLEIFEYLEKYDYEQVVFCQDKESGLKAIIAIHDTTLGPALGGTRMWTYDSEEAAIEDALRLAKGMTYKNAAAGLNLGGAKTVIIGDPRKDKSEAMFRALGRYIQGLNGRYITAEDVGTTVDDMDIIHEETDFVTGISPSFGSSGNPSPVTAYGVYRGMKAAAKEAFGTDNLEGKVIAVQGVGNVAYHLCKHLHAEGAKLIVTDINKEAVQRAVEEFGASAVEPNEIYGVECDIYAPCALGATVNDETIPQLKAKVIAGSANNQLKEDRHGDIIHEMGIVYAPDYVINAGGVINVADEMYGYNRERALKRVESIYDTIAKVIEISKRDGIATYVAADRLAEERIASLKNSRSTYLRNGHDIISRR

SEQ ID NO: 383 - protein, 368 aa, Unknown
  Bacteriovorax sp. BAL6_X
MPSFERLYKDGHEEVIFFSDPSCNLKAIVAIHNTVLGPALGGTRMWPYESEEEALNDVLRLSRGMTYKNAVAGLNLGGGKAVIIGDPEKDKSEALFRSYGRFMESLNGRYITAEDVNISVDDIEHVFTETNNVAGVAEIHGGSGNPSPWTARGVFRGIEAACMKVYGNRSPKGKVVALQGAGSVGRYLGEYLYNEGAEVYVCDINEKNLELFKEKVPNAKVVGIDEIYDVKMDIYAPCALGATINDDTIDRLQCKIVAGAANNQLAENRHGKILKERGVLYAPDYLINAGGVMNVSIEFEGWSEDKAIRMVDSIYDTTLEVFNISEEQDIPVYQATDILAESRIESIKNIQGKFLGHVGHRFPGRKKR

SEQ ID NO: 384 - protein, 368 aa, Pseudoalteromonas luteoviolacea
MIESGQFQRYLTRSDNNRRIIKVAVFNQVEFDNHEQVVFCSDEKSGLKAIIAVHSTKLGPAVGGCRLWDYAEDQDAVYDVLRLSKGMTYKNAVARLPFGGGKSVIIGDAKSIKSEELFRAFGRHLERLGGSYYSAEDVNITTGDVMVMHKETNYVLGLEGKSGNPSPFTALGTFLGIKAAYQHKFGHQDLTGVKVAVQGLGAVAYGLCKHLHEAGAKLFVTDINQASIDRVVTDFGAVAVDIDEIYDLDVDVYAPCALGATVNDETIPRIKATIIAGCANNQLAEPRHGDVLREKGVLYAPDYVINAGGIINVYYETKPEGYNEALATKHVEGIFDTLAEIFKRSDEEQKSTHVIADELAQEIIENGL

SEQ ID NO: 385 - protein, 366 aa, Artificial Sequence
  Synthetic polypeptide
MTLEIFEYLEKYDYEQVVFCQDKESGLKAIIAIHDTTLGPALGGTRMWTYDSEEAAIEDALRLAKGMTYKNAAAGLNLGGAKTVIIGDPRKDKSEAMFRALGRYIQGLNGRYITAEDVGTTVDDMDIIHEETDFVTGISPSFGSSGNPSPVTAYGVYRGMKAAAKEAFGTDNLEGKVIAVQGVGNVAYHLCKHLHAEGAKLIVTDINKEAVQRAVEEFGASAVEPNEIYGVECDIYAPCALGATVNDETIPQLKAKVIAGSANNQLKEDRHGDIIHEMGIVYAPDYVINAGGVINCADELYGYNRERALKRVESIYDTIAKVIEISKRDGIATYVAADRLAEERIASLKNSRSTYLRNGHDIISRR

SEQ ID NO: 386 - protein, 366 aa, Artificial Sequence
  Synthetic polypeptide
MTLEIFEYLEKYDYEQVVFCQDKESGLKAIIAIHDTTLGPALGGTRMWTYDSEEAAIEDALRLAKGMTYKNAAAGLNLGGAKTVIIGDPRKDKSEAMFRALGRYIQGLNGRYITAEDVGTTVDDMDIIHEETDFVTGISPSFGSSGNPSPVTAYGVYRGMKAAAKEAFGTDNLEGKVIAVQGVGNVAYHLCKHLHAEGAKLIVTDINKEAVQRAVEEFGASAVEPNEIYGVECDIYAPCALGATVNDETIPQLKAKVIAGSANNQLKEDRHGDIIHEMGIVYAPDYVINAGGVINVEDELYGYNRERALKRVESIYDTIAKVIEISKRDGIATYVAADRLAEERIASLKNSRSTYLRNGHDIISRR

SEQ ID NO: 387 - protein, 348 aa, Idiomarina xiamenensis
MSLFEHKEFDQHEQVVFCHDKATGLKAIIAIHDTTMGPALGGTRLWNYASSSEALTDVLRLSRGMTYKSAISGLPLGGGKAVIIGDAKQIKSAELFRAYGRFVNSLSGRYITAEDVNIRTSDIAIVAEETNFVAGTEGKAGDPSPHTALGTYLGLKIAAKHRLGSEDLSGVKIAVQGLGAVGYAFAEYLAKDGAELFVTDINEEAVNKAVNELGATAVGLDDIYGLDVDIYAPCALGATINDDTLQQLKAKVIAGSANNQLATPKHDQLVKDQGILYAPDYVINAGGVIHICSEAANFTVEETEKRVRGIYDTLDNVFTRAAEQNRPTGEIADAMAREIIANEKKKKA

SEQ ID NO: 388 - protein, 366 aa, Artificial Sequence
  Synthetic polypeptide
MTLEIFEYLEKYDYEQVVFCQDKESGLKAIIAIHDTTLGPALGITRMWTYDSEEAAIEDALRLAKGMTYKNAAAGLNLGGAKTVIIGDPRKDKSEAMFRALGRYIQGLNGRYITAEDVGTTVDDMDIIHEETDFVTGISPSFGSSGNPSPVTAYGVYRGMKAAAKEAFGTDNLEGKVIAVQGVGNVAYHLCKHLHAEGAKLIVTDINKEAVQRAVEEFGASAVEPNEIYGVECDIYAPCALGATVNDETIPQLKAKVIAGSANNQLKEDRHGDIIHEMGIVYAPDYVINAGGVINVADELYGYNRERALKRVESIYDTIAKVIEISKRDGIATYVAADRLAEERIASLKNSRSTYLRNGHDIISRR

SEQ ID NO: 389 - protein, 364 aa, Unknown
  Bacillus sp. FJAT-22090
MEIFKYMETYDYEQLVFCQDKTSGLKAIIAIHDTTLGPALGGTRMWNYATEEEAIEDALRLAKGMTYKNAAAGLNLGGGKTVIIGDPLKDKNEEMFRAFGRFIQGLNGRYITAEDVGTTVADMDLIHEETNYVTGISEAFGSSGNPSPVTAYGVYVGMKAAAKEAFGSDSLAGKTVAVQGVGNVAYTLCEYLHNEGAKLIIADINQASVDRAVNAFGAVQVGVDEIYSQEADIFAPCALGAIINDSTIPQLKAKVIAGSANNQLKDTKHGDLIHEMGIAYAPDYVINSGGVINVADELYGYNHDRAMNRVAGIYDKIERIFEISKRDGIPTYVAADRLAEERIARVSKSRSQFLQNGKHIITGR

SEQ ID NO: 390 - protein, 366 aa, Artificial Sequence
  Synthetic polypeptide
MTLEIFEYLEKYDYEQVVFCQDKESGLKAIIAIHDTTLGPALGGTRMWTYDSEEAAIEDALRLAKGSTYKNAAAGLNLGGAKTVIIGDPRKDKSEAMFRALGRYIQGLNGRYITAEDVGTTVDDMDIIHEETDFVTGISPSFGSSGNPSPVTAYGVYRGMKAAAKEAFGTDNLEGKVIAVQGVGNVAYHLCKHLHAEGAKLIVTDINKEAVQRAVEEFGASAVEPNEIYGVECDIYAPCALGATVNDETIPQLKAKVIAGSANNQLKEDRHGDIIHEMGIVYAPDYVINAGGVINVADELYGYNRERALKRVESIYDTIAKVIEISKRDGIATYVAADRLAEERIASLKNSRSTYLRNGHDIISRR

SEQ ID NO: 391 - protein, 361 aa, Unknown
  Azoarcus sp. CIB
MHPFQTNEGDIMSVFNLSDFADHEQVVFCSDEKSGLKAIIAVHNSNLGPALGGCRMWPYASEEEAIRDVLRLSRGMTYKSAMANLKLGGGKSVIIGNPRTDKTPELLKAFAQAVERVNGRYIAAEDSGTGVDDMKFMSQFTDHVAGIIDKPSENGVRSGDPSPATAYGTFVGIKAAVKERLGRDSLAGLKIAVQGLGNVGFDLARQLKEAGAQLWVTDIHREPLIRAGKELDATVVAPDEIFGLDVDVFAPCAMGAIINDQTLPQLKAKIVAGAANNQLAEPRHGLALMNKGILYAPDYVINAGGIIDVYYERTGNFDRAALKSHIESIYDNLMEIFARARKEERPTGEVADAIAEERFKR

SEQ ID NO: 392 - protein, 366 aa, Artificial Sequence
  Synthetic polypeptide
MTLEIFEYLEKYDYEQVVFCQDKESGLKAIIAIHDTTLGPALGGTRMWTYDSEEAAIEDALRLAKGMTYKNAAAGLNLGGAKTVIIGDPRKDKSEAMFRALGRYIQGLNGRYITTEDVGTTVDDMDIIHEETDFVTGISPSFGSSGNPSPVTAYGVYRGMKAAAKEAFGTDNLEGKVIAVQGVGNVAYHLCKHLHAEGAKLIVTDINKEAVQRAVEEFGASAVEPNEIYGVECDIYAPCALGATVNDETIPQLKAKVIAGSANNQLKEDRHGDIIHEMGIVYAPDYVINAGGVINVADELYGYNRERALKRVESIYDTIAKVIEISKRDGIATYVAADRLAEERIASLKNSRSTYLRNGHDIISRR

SEQ ID NO: 393 - protein, 360 aa, Micromonospora avicenniae
MGVFTSTDDPGSTGHEQVVFCQDKQTGLKAIIGIYSTALGPALGGTRFYPYDSEEAALADVLDLSRGMAYKNALAGLDLGGGKAVIWGDPEKIKSEALLRAYGRFVESLGGRYYTACDVGTYVPDMDVIARETRYVTGRSVEHGGAGDSSILTAWGVFQGMRAAAEHVWGEPTLRGRRVGVTGLGKVGKYLVGHLLDDGAEVVASDVNPRALEWARTNHPQVTLVDDAALLVSSDIDVYAPCALGGALNDETVPALRAKVVAGAANNQLAHSGIEKLLADRGILYAPDYVVNAGGVIQVADEIEGFNFERAKLRATRIYDTTREILELADAEGVPPAVAADRLAERRMAEVGRLRTIHLP

SEQ ID NO: 394 - protein, 364 aa, Terribacillus goriensis
MKIFETLEQYDYEQLVLCQDKESGLKAIIAIHDTTLGPALGGTRMWTYATEEDAIVDALRLAKGMTYKNAAAGLNLGGGKTVIIGDPKKDKNEAMFRAFGRYVQSLNGRYITAEDVGTTVEDMELIHTETDFVTGISAESGSSGNPSPVTAYGVYKGIKASAKEAFGDDSLEGKTIAVQGIGNVAYALCEHLHAEGAKLIVTDINKEAVQKAVEAFGATAVDPDDIYGVECDIFAPCALGAVINDDTLRVLKAKVVAGAANNQLKEEHHGQILFERGIVYAPDYVINSGGVINVEDELHGYNRERALRKVETIYDSLQRVFEIAKRDEIPTSIAADRMAEERIETMRKSRSQFLRNGHHTLSRR

SEQ ID NO: 395 - protein, 366 aa, Artificial Sequence
  Synthetic polypeptide
MTLEIFEYLEKYDYEQVVFCQDKESGLKAIIAIHDTTLGPALGYTRMWTYDSEEAAIEDALRLAKGMTYKNAAAGLNLGGAKTVIIGDPRKDKSEAMFRALGRYIQGLNGRYITAEDVGTTVDDMDIIHEETDFVTGISPSFGSSGNPSPVTAYGVYRGMKAAAKEAFGTDNLEGKVIAVQGVGNVAYHLCKHLHAEGAKLIVTDINKEAVQRAVEEFGASAVEPNEIYGVECDIYAPCALGATVNDETIPQLKAKVIAGSANNQLKEDRHGDIIHEMGIVYAPDYVINAGGVINVADELYGYNRERALKRVESIYDTIAKVIEISKRDGIATYVAADRLAEERIASLKNSRSTYLRNGHDIISRR

SEQ ID NO: 396 - protein, 366 aa, Artificial Sequence
  Synthetic polypeptide
MTLEIFEYLEKYDYEQVVFCQDKESGLKAIIAIHDTTLGPALGGTRMWTYDSEEAAIEDALRLAKGMTYKNAAAGLNLGGAKTVIIGDPRKDKSEAMFRALGRYIQGLNGRYITAEDVGTTVDDMDIIHEETDFVTGISPSFGSSGNPSPVTAYGVYRGMKAAAKEAFGTDNLEGKVIAVQGVGNVAYHLCKHLHAEGAKLIVTDINKEAVQRAVEEFGASAVEPNEIYGVECDIYAPCALGATVNDETIPQLKAKVIAGSANNQLKEDRHGDIIHEMGIVYAPDYVINAGGVINVADEHYGYNRERALKRVESIYDTIAKVIEISKRDGIATYVAADRLAEERIASLKNSRSTYLRNGHDIISRR

SEQ ID NO: 397 - protein, 367 aa, Mizugakiibacter sediminis
MIFETIATSGHEEVVFCHNKDAGLKAIIAVHNTVLGPALGGLRMWPYKTEQEALNDVLRLSRGMTYKNAVAGLNLGGGKAVIIGDPSKDKSEALFRAFGRFVNSLNGRYITAEDVGIDVNDMEWVFRETEFVTGVHQVHGGSGDPSPFTAFGTLQGLMATLSARFGNEDVGKYSYAVQGVGHVGMEFVKLLREQGAKVFVTDINKEAVQRCVDELGCEAVGLDDIYDVDADVYSPCALGGTVNEKTLPRLKMKIICGAANNQLANDAIGDEVEKRGILYAPDYAVNAGGVMNVSLEIDGYNRERAMRMMRTIYYNLSRIFQIAKRDGIPTYKAADRMAEERISAIGKIKLPTMGNHGPRFLGRMRGQ

SEQ ID NO: 398 - protein, 368 aa, Flavobacterium haoranii
MTADLLTTSELHKVDPVFGQVSFDGHEQVVFCYDKDTGLKAIIGIHNTVLGPALGGTRMWKYTNEWEALNDVLRLSRGMTFKNSISGLNLGGGKAVIIGDAKTEKTPELMTRFGQFVDSLSGKYITAEDVGMETKDMDIVNNVTKHVAGISVERGGSGNPSPVTAYGVFMGMKAAAKYKFGSDNLEGKSVLVQGIGHVGEVLVQHLTESGAIVSITDINEDRVHQVGSKYGAKIFTGADLYAADVDIYAPCALGATINDDTIDKIQAKVIAGAANNQLANELKHGKILKEKGILYAPDFLINAGGVINVYSELANLTKAQVMEKTENIYNTALEIFDFADKNNVTTHAAALSIAQKRIEDRKNELQNK

SEQ ID NO: 399 - protein, 349 aa, Sedimenticola thiotaurini
MKLFSHHEFDNHEQVVFCHDKTSGLKAIIAIHNTHRGPALGGCRMYPYASEAEALNDVLRLSRGMTYKSAIANLPLGGGKSVIIGDPHSDKTPQLIRAMGVAVERLGGRYIVAEDSGTSVPDMLLMSEQTRHISGIAEKFDADGKRRSGDPSPITARGVFVGIQAAVRYRLGRDDLQGVRVAIQGLGNVGYHLASQLRAAGARLWVSDINQAAVQRAVDELGAVAVANGEIYDQAVDLFAPCAMGAILNDTTIPRLQARIVAGAANNQLADKRHGQALMERGILYAPDYVINAGGVIDVCYERSDMDPQQVMEQVDGIGDTLTEIFSRAEQQHKPTDVLADQLAEERFS

SEQ ID NO: 400 - protein, 366 aa, Artificial Sequence
  Synthetic polypeptide
MTLEIFEYLEKYDYEQVVFCQDKESGLKAIIAIHDTTLGPALGGTRMWTYDSEEAAIEDALRLAKGMTYKNAAAGLNHGGAKTVIIGDPRKDKSEAMFRALGRYIQGLNGRYITAEDVGTTVDDMDIIHEETDFVTGISPSFGSSGNPSPVTAYGVYRGMKAAAKEAFGTDNLEGKVIAVQGVGNVAYHLCKHLHAEGAKLIVTDINKEAVQRAVEEFGASAVEPNEIYGVECDIYAPCALGATVNDETIPQLKAKVIAGSANNQLKEDRHGDIIHEMGIVYAPDYVINAGGVINVADELYGYNRERALKRVESIYDTIAKVIEISKRDGIATYVAADRLAEERIASLKNSRSTYLRNGHDIISRR

SEQ ID NO: 401 - protein, 344 aa, Pseudogulbenkiania subflava
MSIFELPDFDGHEQVVFASDSQSGLKAIIAIHNTHRGPAMGGCRMWAYPDSTVAATDALRLARGMTYKNAMAGLPIGGGKAVIIGDARTSKSPELFRALGRAIDQLGGRYITAEDVGTSPADMTFVREQTRYVAGLSGDLGGTGDPSPATALGVFVGIEAAVRHRLGVDSVNGLTVAVQGLGHVGYDLARRLHEAGARLIVADIDRANGERAAAEFGASVVSPDEIVDAQADVFAPCALGAVLNRQTLPRLKCSVVAGAANNQLATDDIGEMLRDAGVLYAPDYVINAGGIIKVCAEYLQEPVDSVEDRVRAISGTLDEVFQMAERDGIATSRAADTLARTRFA

SEQ ID NO: 402 - protein, 366 aa, Artificial Sequence
  Synthetic polypeptide
MTLEIFEYLEKYDYEQVVFCQDKESGLKAIIAIHDTTLGPALGGTRMWTYDSEEAAIEDALRLAKGMTYKNAAAGLNLGGAKTVIIGDPRKDKSEAMFRALGRYIQGLNGRYITAEDVGTTVDDMDIIHEETDFVTGISPSFGSSGNPSPVTAYGVYRGMKAAAKEAFGTDNLEGKVIAVQGVGNVAYHLCKHLHAEGAKLIVTDINKEAVQRAVEEFGASAVEPNEIYGVECDIYAPCALGATVNDETIPQLKAKVIAGSANNQLKEDRHGDIIHEMGIVYAPDYVINAGGVINLADELYGYNRERALKRVESIYDTIAKVIEISKRDGIATYVAADRLAEERIASLKNSRSTYLRNGHDIISRR

SEQ ID NO: 403 - protein, 344 aa, Carboxydothermus pertinax
MEISKKENYQGYEWVVFASDDKTNFKAIIAVHSTELGPALGGCRMWFYNNENEALTDVLRLAEGMTYKNSAMGLNLGGGKAVIIGDPRTDKSPELFARFAEAVNSLGGKYYTAEDVGISPADMLEVYKHTPYVVGLPAKSGDPSPFTAYGVYVGMKAAVEEAFGDTSLEGKKVAVQGLGHVGMYLLEHLYNEGAKLIVTDIFTERVKEAVERFGALPVEPEKIYEVEADIFAPCALGAILNENTIPRLKVKVIAGAANNQLAKLSDGFLLRDRGIVYAPDFIINGGGVINVAEELNPEGYDKNRVWEKVATIYHKVKEVLTLAREQNISPQEAAIRYAKKRLNR

SEQ ID NO: 404 - protein, 366 aa, Artificial Sequence
  Synthetic polypeptide
MTLEIFEYLEKYDYEQVVFCQDKESGLKAIIAIHDTTLGPALGGTRMWTYDSEEAAIEDALRLAKGMTYKNAAAGLNLGGAKTVIIGDPRKDKSEAMFRALGRYIQGLNGRYITAEDVGTTVDDMDIIHEETDFVTGISPSFGSSGNPSPVTAYGVYRGMKAAAKEAFGTDNLEGKVIAVQGVGNVAYHLCKHLHAEGAKLIVTDINKEAVQRAVEEFGASAVEPNEIYGVECDIYAPCALGATVNDETIPQLKAKVIAGSANNQLKEDRHGDIIHEMGIVYAPDYVINAGGVINVADEYYGYNRERALKRVESIYDTIAKVIEISKRDGIATYVAADRLAEERIASLKNSRSTYLRNGHDIISRR

SEQ ID NO: 405 - protein, 366 aa, Artificial Sequence
  Synthetic polypeptide
MTLEIFEYLEKYDYEQVVFCQDKESGLKAIIAIHDTTLGPALGGTRMWTYDSEEAAIEDALRLAKGMTYKNAAAGLNLGGAKTVIIGDPRKDKSEAMFRALGRYIQGLNGRYITANDVGTTVDDMDIIHEETDFVTGISPSFGSSGNPSPVTAYGVYRGMKAAAKEAFGTDNLEGKVIAVQGVGNVAYHLCKHLHAEGAKLIVTDINKEAVQRAVEEFGASAVEPNEIYGVECDIYAPCALGATVNDETIPQLKAKVIAGSANNQLKEDRHGDIIHEMGIVYAPDYVINAGGVINVADELYGYNRERALKRVESIYDTIAKVIEISKRDGIATYVAADRLAEERIASLKNSRSTYLRNGHDIISRR

SEQ ID NO: 406 - protein, 371 aa, Planomonospora sphaerica
MTDVFGLSHKDSSPVSTPMSGQAGHEQVVFCSDERSGLRAIIAIHNTALGPALGGTRFYPYESEQAALADVLNLSRAMAYKNALAGLDLGGGKAVIIGHPETDKNEAMLRAYGRFVQSLGGRYLTACDVGTYSEDMDLIARETSYVTGRTLAQGGAGDSSILTAFGVFQGMRAASEHVFGTSSLRGRRVGVEGVGKVGHRLVDHLVEDGAEVVVCDVSERAVELVRRRHPQVEVVADQSALTAADIDVYAPCALGGALDDGTVARLRASIVCGGANNQLAHPGVEKQLADRGILYAPDYVVNSGGVIQVADEIQGFDMDRARAKAEKIYATTLKIFTTAAEDGVPPAVAADRLAERRMSEVGRIRGIWLGR

SEQ ID NO: 407 - protein, 366 aa, Artificial Sequence
  Synthetic polypeptide
MTLEIFEYLEKYDYEQVVFCQDKESGLKAIIAIHDTTLGPALGGTRMWTYDSEEAAIEDALRLAKGMTYKNAAAGLNLGGAKTVIIGDPRKDKSEAMFRALGRYIQGLNGRYITAEDVGTTVDDMDIIHEETDFVTGISPSFGSSGNPSPVTAYGVYRGMKAAAKEAFGTDNLEGKVIAVQGVGNVAYHLCKHLHAEGAKLIVTDINKEAVQRAVEEFGASAVEPNEIYGVECDIYAPCALGATVNDETIPQLKAKVIAGSANNQLKEDRHGDIIHEMGIVYAPDYVINAGGVINVKDELYGYNRERALKRVESIYDTIAKVIEISKRDGIATYVAADRLAEERIASLKNSRSTYLRNGHDIISRR

SEQ ID NO: 408 - protein, 366 aa, Artificial Sequence
  Synthetic polypeptide
MTLEIFEYLEKYDYEQVVFCQDKESGLKAIIAIHDTTLGPALGGTRMWTYDSEEAAIEDALRLAKGMTYKNAAAGLNYGGAKTVIIGDPRKDKSEAMFRALGRYIQGLNGRYITAEDVGTTVDDMDIIHEETDFVTGISPSFGSSGNPSPVTAYGVYRGMKAAAKEAFGTDNLEGKVIAVQGVGNVAYHLCKHLHAEGAKLIVTDINKEAVQRAVEEFGASAVEPNEIYGVECDIYAPCALGATVNDETIPQLKAKVIAGSANNQLKEDRHGDIIHEMGIVYAPDYVINAGGVINVADELYGYNRERALKRVESIYDTIAKVIEISKRDGIATYVAADRLAEERIASLKNSRSTYLRNGHDIISRR

SEQ ID NO: 409 - protein, 366 aa, Bacillus cellulosilyticus
MELFKYMETYDYEQVVVCQDKQSGLKAIIAIHDTTLGPALGGTRMWTYESEEAAFEDALRLAKGMTYKNAAAGLNLGGGKTVIIGDPRKDKNEAMFRAFGRYIQGLNGRYITAEDVGTSVEDMDIVYQETDYVTGISPAFGSSGNPSPVTAYGVFVGMKAAAKEAFGTDSLEGKKVAVQGVGNVAFTLCKYLHEEGAKLIVTDINKDAVKRAVEEFDAEAVDPEDIYSVQCDIYSPCALGATINDNTIPKLKAKVIAGAANNQLKETRHGDILQEIGIVYAPDYVINSGGVINVADELLGYNRDRAFKKVETIYDSISTIFKIAKRDSIPTYAAADRMAEERIENMRRSRKQFLRSDVNIISRGRR

SEQ ID NO: 410 - protein, 366 aa, Artificial Sequence
  Synthetic polypeptide
MTLEIFEYLEKYDYEQVVFCQDKESGLKAIIAIHDTTLGPALGGTRMWTYDSEEAAIEDALRLAKGMTYKHAAAGLNLGGAKTVIIGDPRKDKSEAMFRALGRYIQGLNGRYITAEDVGTTVDDMDIIHEETDFVTGISPSFGSSGNPSPVTAYGVYRGMKAAAKEAFGTDNLEGKVIAVQGVGNVAYHLCKHLHAEGAKLIVTDINKEAVQRAVEEFGASAVEPNEIYGVECDIYAPCALGATVNDETIPQLKAKVIAGSANNQLKEDRHGDIIHEMGIVYAPDYVINAGGVINVADELYGYNRERALKRVESIYDTIAKVIEISKRDGIATYVAADRLAEERIASLKNSRSTYLRNGHDIISRR

SEQ ID NO: 411 - protein, 359 aa, Tenericutes bacterium
MSDFKHFEYMAKHRYEQVVYFYDKTTGLKGITCIHNTTLGPALGGTRLWNYASEEDAVIDALRLARGMTYKAAAAGLNLGGGKTVLIGDPETVKSEGYFRALGRYVQSLNGRYITAEDVNTSTKDMDFVAMETDYVVGLEGKSGNPSPMTALGAFHGIRAALQYKFGNEEFSKYTFAVQGAGQTGYYLIKKLVEAKAKKIYFSEINPKHIERMKREHPDVEFVEPKNYFGLNVDVIVPCALGGVLNDESIPQIKAKVIAGTANNVLLDEDIHGTMIKEKGILYAPDFVINAGGLINVYHELKEYNVGRATRDIEKIYDRLLEIFKIADTENIHTQQAAKVFAKKRIETINNVQDNYIKR

SEQ ID NO: 412 - protein, 366 aa, Artificial Sequence
  Synthetic polypeptide
MTLEIFEYLEKYDYEQVVFCQDKESGLKAIIAIHDTTLGPALGGTRMWTYDSEEAAIEDALRLAKGMTYKNAAAGLNLGGAKTVIIGDPRKDKSEAMFRALGRYIQGLNGRYITAWDVGTTVDDMDIIHEETDFVTGISPSFGSSGNPSPVTAYGVYRGMKAAAKEAFGTDNLEGKVIAVQGVGNVAYHLCKHLHAEGAKLIVTDINKEAVQRAVEEFGASAVEPNEIYGVECDIYAPCALGATVNDETIPQLKAKVIAGSANNQLKEDRHGDIIHEMGIVYAPDYVINAGGVINVADELYGYNRERALKRVESIYDTIAKVIEISKRDGIATYVAADRLAEERIASLKNSRSTYLRNGHDIISRR

SEQ ID NO: 413 - protein, 359 aa, Acholeplasma brassicae
MNDVKVFDLMEKDKYEQVVYFYDKSTGLKGITVIHNTTLGPALGGTRIWNYESEDDALKDCLRLARGMTYKAAAAGLNLGGGKTVLIGDPKIVKSEAYFRGLGRYVQSLNGRYITAEDVNTSTKDMSYVHMETDYVVGLEGKSGNPSPFTALGAFYGIKAALKYRFNNESIENYTFAVQGAGQTGYYLINYLLNAGAKKIYFSEINESHIARMKKEHPEVIYVEPKDIFTLDVDVFCPCALGGVLNDETIKVLKAPIIAGTANNVLLDEQTHGNALLDKGILYAPDFVINAGGLINVYYELNDYTKEKVEHDIKLIYDRLIQVFDISKNQNIPTQLAAKVFAKNRIESVRNLHDNYIKR

SEQ ID NO: 414 - protein, 366 aa, Artificial Sequence
  Synthetic polypeptide
MTLEIFEYLEKYDYEQVVFCQDKESGLKAIIAIHDTTLGPALGGTRMWTYDSEEAAIEDALRLAKGMTYKNAAAGLNLGGAKTVIIGDPRKDKSEAMFRALGRYIQGLNGRYITARDVGTTVDDMDIIHEETDFVTGISPSFGSSGNPSPVTAYGVYRGMKAAAKEAFGTDNLEGKVIAVQGVGNVAYHLCKHLHAEGAKLIVTDINKEAVQRAVEEFGASAVEPNEIYGVECDIYAPCALGATVNDETIPQLKAKVIAGSANNQLKEDRHGDIIHEMGIVYAPDYVINAGGVINVADELYGYNRERALKRVESIYDTIAKVIEISKRDGIATYVAADRLAEERIASLKNSRSTYLRNGHDIISRR

SEQ ID NO: 415 - protein, 366 aa, Artificial Sequence
  Synthetic polypeptide
MTLEIFEYLEKYDYEQVVFCQDKESGLKAIIAIHDTTLGPALGGTRMWTYDSEEAAIEDALRLAKGMTYKCAAAGLNLGGAKTVIIGDPRKDKSEAMFRALGRYIQGLNGRYITAEDVGTTVDDMDIIHEETDFVTGISPSFGSSGNPSPVTAYGVYRGMKAAAKEAFGTDNLEGKVIAVQGVGNVAYHLCKHLHAEGAKLIVTDINKEAVQRAVEEFGASAVEPNEIYGVECDIYAPCALGATVNDETIPQLKAKVIAGSANNQLKEDRHGDIIHEMGIVYAPDYVINAGGVINVADELYGYNRERALKRVESIYDTIAKVIEISKRDGIATYVAADRLAEERIASLKNSRSTYLRNGHDIISRR

SEQ ID NO: 416 - protein, 368 aa, Flavobacteria bacterium7
MTTDIINSNELHKVDPVFGQISFDGHEQVVFCNDKDTGLKAIIGIHNTVLGPALGGTRMWKYSNEWEALNDVLRLSRGMSFKSSISGLNLGGGKAVIIGDAKTEKTPELMRKFGEYVDSLSGKYITAEDVGMETKDMDTVREVTKYVTGISESKGGSGNPSPITAYGVFMGMKAAVKHKFGVDNLAGKRVLVQGIGHVGEVLVQHLTNEGAIVTISDINENRLHEVGSKYGAKIFTGNDLYSLDVDIYAPCALGATINDDTISKIQAKVIAGAANNQLANEVIHGKLLKEKGILYAPDFLINAGGVINVYSELANLTSAQVMEKTENIYNTAMDIFNLSDVQNITTHQAALNIAQKRIDDRKKELQNK

SEQ ID NO: 417 - protein, 353 aa, Thalassospira alkalitolerans
MNVFSDTAFDGHEQVVFASDPDTGLKSIIAVHNTNLGPSLGGCRMWPYATEQEAIHDVLRLSRGMTYKSALANLPLGGGKSVIIGDPRSQKTPQLFRAMGRAIEQVGGRYIVAEDVGTTPADMVQIASQTKHVGGINDGKDPARTGDPSPFTAYGVFMGLKEAVRFKNGHDDLGGLRVAVQGLGNVGYHLCRMLHKAGAQLVVADLNANNVNNAVTEFGATTVPADEILYADVDILAPCALGGVINDHSINKIRARIIAGAANNQLESDRHGDMLREADILYAPDYVINAGGVVEVYYCREGKPVTETNKHIEGIGATVREIFERAKQQNLSTGFVADRLAEERFGSKAKTVT

SEQ ID NO: 418 - protein, 366 aa, Artificial Sequence
  Synthetic polypeptide
MTLEIFEYLEKYDYEQVVFCQDKESGLKAIIAIHDTTLGPALGGTRMWTYDSEEAAIEDALRLAKGMTYKNAAAGLNLGGAKTVIIGDPRKDKSEAMFRALGRYIQGLNGRYITAEDVGTTVDDMDIIHEETDFVTGISPSFGSSGNPSPVTAYGVYRGMKAAAKEAFGTDNLEGKVIAVQGVGNVAYHLCKHLHAEGAKLIVTDINKEAVQRAVEEFGASAVEPNEIYGVECDIYAPCALGATVNDETIPQLKAKVIAGSANNQLKEDRHGDIIHEMGIVYAPDYVINAGGVINVTDELYGYNRERALKRVESIYDTIAKVIEISKRDGIATYVAADRLAEERIASLKNSRSTYLRNGHDIISRR

SEQ ID NO: 419 - protein, 367 aa, Staphylococcus schleiferi
MIFEKMAQADYEQLVFCHDETTGLKAIICIHDTTLGPALGGCRFWNYETEEEAIIDVMRLAKGMTYKNAAAGLNLGGAKTVVIGDPKKDKSEAFFRALGRYIHSLDGRYITAEDVGTTVEDMDMIHLETPHVCGISESYGSGGNPSPMTALGVYYAMKRTAKEAFGSDSLKGKTVAVQGVGNVAFHMCQYLHDEGAHLIVTDINEEAVQNAVEAFDAQAVGIDEIYSVDADIFAPCALGGVLNDETIPSLKAKMVCGSANNQLLEENRHGQMLEKRGIIYAPDFVVNSGGVINVADELNGYHRERAEKKVKAVYDQMDKIFTIAKETHVLPLQAAEHLAESRINTMMRVHSKYSSKPNNQLRDTRTH

SEQ ID NO: 420 - protein, 366 aa, Artificial Sequence
  Synthetic polypeptide
MTLEIFEYLEKYDYEQVVFCQDKESGLKAIIAIHDTTLGPALGGTRMWTYDSEEAAIEDALRLAKGMTYKNAAAGLNLGGAKTVIIGDPRKDKSEAMFRALGRYIQGLNGRYITAEDVGTTVDDMDIIHEETDFVTGISPSFGSSGNPSPVTAYGVYRGMKAAAKEAFGTDNLEGKVIAVQGVGNVAYHLCKHLHAEGAKLIVTDINKEAVQRAVEEFGASAVEPNEIYGVECDIYAPCALGATVNDETIPQLKAKVIAGSANNQLKEDRHGDIIHEMGIVYAPDYVINAGGVINVWDELYGYNRERALKRVESIYDTIAKVIEISKRDGIATYVAADRLAEERIASLKNSRSTYLRNGHDIISRR

SEQ ID NO: 421 - protein, 366 aa, Artificial Sequence
  Synthetic polypeptide
MTLEIFEYLEKYDYEQVVFCQDKESGLKAIIAIHDTTLGPALGGTRMWTYDSEEAAIEDALRLAKGMTYKNAAAGLNCGGAKTVIIGDPRKDKSEAMFRALGRYIQGLNGRYITAEDVGTTVDDMDIIHEETDFVTGISPSFGSSGNPSPVTAYGVYRGMKAAAKEAFGTDNLEGKVIAVQGVGNVAYHLCKHLHAEGAKLIVTDINKEAVQRAVEEFGASAVEPNEIYGVECDIYAPCALGATVNDETIPQLKAKVIAGSANNQLKEDRHGDIIHEMGIVYAPDYVINAGGVINVADELYGYNRERALKRVESIYDTIAKVIEISKRDGIATYVAADRLAEERIASLKNSRSTYLRNGHDIISRR

SEQ ID NO: 422 - protein, 355 aa, Aeromicrobium marinum
MTVFSHPHEQVVFCHDPASGLRAIIGLYSTALGPGLGGTRFHPYASEADALADVLNLSHGMAYKNALAGLDLGGGKAVIIGDPRTDKSEALLRAYGRFVESLAGRYYTACDVGTFSPDMDVIARETSYVTGRTVEHGGAGDSSVLTAFGVYQGMRAAAQHRWGSPSLAGRTVGVAGVGKVGRHLVSHLVEEDARVVVTDPVDAAVSHVLSLSSDVRSVASTEALLAEPLDVYAPCALGGALTDAVVQTLSAGIVCGGANNQLAHPGVAKLLDEAGITYAPDYCVNAGGVIQVADELDGFDFDRAKRRATGIFDTTLAVLERAASDGTTTADAADRQAEQRMREIGRLGQVWLPTR

SEQ ID NO: 423 - protein, 367 aa, Sinomicrobium oceani
MNTDILHAGELKKADPVFGQLSFDDHEQIVFCNDKDTGLKAIIGIHNTVLGPALGGTRMWNYNSEWEALNDVLRLSRGMTFKSAITGLNLGGGKAVIIGDAKTRKTPELMRRFGEFVNTLGGKYITAEDVGMETSDMDLVRDVTPYVTGVSESRGGAGNPSPITAYGVYMGMKAAAAHRFGTDKLEGKQVLVQGIGHVGESLVEHLTKEGARVFITDINEDRLQEVSKKYGAVIYAGDDLYTAAVDIYAPCALGATINDDTVYKIKAGVVAGAANNQLADENRHGKILMERGIAYAPDFLINAGGIINVYAELEGYGKDEIIRKTENIYTTTLEIFAHSAKNGCSTHQSALRVAQGRIDARKQGKGA

SEQ ID NO: 424 - protein, 366 aa, Artificial Sequence
  Synthetic polypeptide
MTLEIFEYLEKYDYEQVVFCQDKESGLKAIIAIHDTTLGPALGKTRMWTYDSEEAAIEDALRLAKGMTYKNAAAGLNLGGAKTVIIGDPRKDKSEAMFRALGRYIQGLNGRYITAEDVGTTVDDMDIIHEETDFVTGISPSFGSSGNPSPVTAYGVYRGMKAAAKEAFGTDNLEGKVIAVQGVGNVAYHLCKHLHAEGAKLIVTDINKEAVQRAVEEFGASAVEPNEIYGVECDIYAPCALGATVNDETIPQLKAKVIAGSANNQLKEDRHGDIIHEMGIVYAPDYVINAGGVINVADELYGYNRERALKRVESIYDTIAKVIEISKRDGIATYVAADRLAEERIASLKNSRSTYLRNGHDIISRR

SEQ ID NO: 425 - protein, 366 aa, Artificial Sequence
  Synthetic polypeptide
MTLEIFEYLEKYDYEQVVFCQDKESGLKAIIAIHDTTLGPALGGTRMWTYDSEEAAIEDALRLAKGMTYKNAAAGLNLGGAKTVIIGDPRKDKSEAMFRALGRYIQGLNGRYITSEDVGTTVDDMDIIHEETDFVTGISPSFGSSGNPSPVTAYGVYRGMKAAAKEAFGTDNLEGKVIAVQGVGNVAYHLCKHLHAEGAKLIVTDINKEAVQRAVEEFGASAVEPNEIYGVECDIYAPCALGATVNDETIPQLKAKVIAGSANNQLKEDRHGDIIHEMGIVYAPDYVINAGGVINVADELYGYNRERALKRVESIYDTIAKVIEISKRDGIATYVAADRLAEERIASLKNSRSTYLRNGHDIISRR

SEQ ID NO: 426 - protein, 366 aa, Artificial Sequence
  Synthetic polypeptide
MTLEIFEYLEKYDYEQVVFCQDKESGLKAIIAIHDTTLGPALGGTRMWTYDSEEAAIEDALRLAKGMTYKNAAAGLNLGGAKTVIIGDPRKDKSEAMFRALGRYIQGLNGRYITAEDVGTTVDDMDIIHEETDFVTGISPSFGSSGNPSPVTAYGVYRGMKAAAKEAFGTDNLEGKVIAVQGVGNVAYHLCKHLHAEGAKLIVTDINKEAVQRAVEEFGASAVEPNEIYGVECDIYAPCALGATVNDETIPQLKAKVIAGSANNQLKEDRHGDIIHEMGIVYAPDYVINAGGVINVADESYGYNRERALKRVESIYDTIAKVIEISKRDGIATYVAADRLAEERIASLKNSRSTYLRNGHDIISRR

SEQ ID NO: 427 - protein, 366 aa, Artificial Sequence
  Synthetic polypeptide
MTLEIFEYLEKYDYEQVVFCQDKESGLKAIIAIHDTTLGPALGGTRMWTYDSEEAAIEDALRLAKGMTYKNAAAGLNLGGAKTVIIGDPRKDKSEAMFRALGRYIQGLNGRYITAEDVGTTVDDMDIIHEETDFVTGISPSFGSSGNPSPVTAYGVYRGMKAAAKEAFGTDNLEGKVIAVQGVGNVAYHLCKHLHAEGAKLIVTDINKEAVQRAVEEFGASAVEPNEIYGVECDIYAPCALGATVNDETIPQLKAKVIAGSANNQLKEDRHGDIIHEMGIVYAPDYVINAGGVINVADEWYGYNRERALKRVESIYDTIAKVIEISKRDGIATYVAADRLAEERIASLKNSRSTYLRNGHDIISRR

SEQ ID NO: 428 - protein, 367 aa, Flavobacteria bacterium
MTAELLKANELHKVDPVFGQVSFDGHEQVVFCHDKDTGLKAIIGIHNTVLGPALGGTRMWNYTNEWEALNDVLRLSRGMTFKNSISGLNLGGGKAVIIGDAKTQKSPELMRRFGQFVDSLSGKYITAEDVGMETKDMDTVNEVTKHVAGISVERGGSGNPSPVTAYGVFMGMKAAAKYKYGSDSLEGKKVLVQGIGHVGEVLVQHLTESGALVTITDINEDRVNQVGAKYGAKIYTGADLYSADVDIYAPCALGATINDATINNIKASIIAGAANNQLANEAVHGKILKEKGILYAPDFLINAGGVINVYSELVKWTNAQVMEKTENIYNTALEIFKFADDNNITTHQAAFSMAQKRIDDAKNELKK

SEQ ID NO: 429 - protein, 360 aa, Streptomyces silvensis
MTDVTDGVLHTLFHSDQGGHEQVVLCQDRASGLKAVIAIHSTALGPALGGTRFYPYASEEAAVADALNLARGMSYKNAMAGLDHGGGKAVIIGDPDKIKSDELLLAYGRFVASLGGRYVTACDVGTYVADMDVVARENRWTTGRSPEHGGAGDSSVLTAFGVFQGMRASAQHLWGEASLRGRKVGVAGVGKVGHILVEHLLEDGAEVVITDVREDSLLRITSKHPEVTAVADTDTLIRTEGLDVYAPCALGGALDDDTVPVLTARVVCGAANNQLAHPGVEKDLADRGILYAPDYVVNAGGVIQVADELHGFDFDRCKEKASKIFDTTVAIFARAKQDGIPPAAAADRIAEQRIAEARGR

SEQ ID NO: 430 - protein, 366 aa, Artificial Sequence
  Synthetic polypeptide
MTLEIFEYLEKYDYEQVVFCQDKESGLKAIIAIHDTTLGPALGGTRMWTYDSEEAAIEDALRLAKGMTYKNAAAGLNLGGAKTVIIGDPRKDKSEAMFRALGRYIQGLNGRYITAEDVGTTVDDMDIIHEETDFVTGISPSFGSSGNPSPVTAYGVYRGMKAAAKEAFGTDNLEGKVIAVQGVGNVAYHLCKHLHAEGAKLIVTDINKEAVQRAVEEFGASAVEPNEIYGVECDIYAPCALGATVNDETIPQLKAKVIAGSANNQLKEDRHGDIIHEMGIVYAPDYVINAGGVINEADELYGYNRERALKRVESIYDTIAKVIEISKRDGIATYVAADRLAEERIASLKNSRSTYLRNGHDIISRR

SEQ ID NO: 431 - protein, 366 aa, Artificial Sequence
  Synthetic polypeptide
MTLEIFEYLEKYDYEQVVFCQDKESGLKAIIAIHDTTLGPALGGTRMWTYDSEEAAIEDALRLAKGMTYKNAAAGLNLGGAKTVIIGDPRKDKSEAMFRALGRYIQGLNGRYITAEDVGTTVDDMDIIHEETDFVYGISPSFGSSGNPSPVTAYGVYRGMKAAAKEAFGTDNLEGKVIAVQGVGNVAYHLCKHLHAEGAKLIVTDINKEAVQRAVEEFGASAVEPNEIYGVECDIYAPCALGATVNDETIPQLKAKVIAGSANNQLKEDRHGDIIHEMGIVYAPDYVINAGGVINVADELYGYNRERALKRVESIYDTIAKVIEISKRDGIATYVAADRLAEERIASLKNSRSTYLRNGHDIISRR

SEQ ID NO: 432 - protein, 366 aa, Artificial Sequence
  Synthetic polypeptide
MTLEIFEYLEKYDYEQVVFCQDKESGLKAIIAIHDTTLGPALGGTRMWTYDSEEAAIEDALRLAKGMTYKNAAAGLNLGGAKTVIIGDPRKDKSEAMFRALGRYIQGLNGRYITVEDVGTTVDDMDIIHEETDFVTGISPSFGSSGNPSPVTAYGVYRGMKAAAKEAFGTDNLEGKVIAVQGVGNVAYHLCKHLHAEGAKLIVTDINKEAVQRAVEEFGASAVEPNEIYGVECDIYAPCALGATVNDETIPQLKAKVIAGSANNQLKEDRHGDIIHEMGIVYAPDYVINAGGVINVADELYGYNRERALKRVESIYDTIAKVIEISKRDGIATYVAADRLAEERIASLKNSRSTYLRNGHDIISRR

SEQ ID NO: 433 - protein, 359 aa, Unknown
  Nonomuraea sp. ATCC 55076
MTDVFGASHKDVHEQVVFCADEQSGLRAIIAIHNTALGPALGGTRFYPYESESAALADVLNLAKGMAYKNALAGLDLGGGKAVIIGDPARDKSEALLRAYGRFVESLGGRYITACDVGTYSEDMDVVARESRFVTGRTTANGGAGDSSILTAFGVFQGMRASAERVYGTPSLHGRRVGVEGVGKVGHRLVELLREDGAEVVICDVDPKAVERVRLRHPEVDVVADARTLMASDLDVFAPCALGGALDDETVTTLRAKIVCGAANNQLAHPGVEKQLAERGILYAPDYVVNSGGVIQVADEIGGFDMERARSKAAQIYDTTLKIFAIAADEGVPPAVAADRLAERRMSEVGRIRAIWLGH

SEQ ID NO: 434 - protein, 365 aa, Unknown
  Bacillus sp. JCM 19045
MNLFTKMVERDYEQLVVCQDKTSGLKAIIAIHDTTLGPALGGTRMWNYETEEEAFEDVLRLSRGMTYKNAAAGLNLGGGKAVIIGDARKDKNQEMFRAFGRYIQGLNGRYITAEDVGTTVEDMDIIHDETDYVTGISPAFGASGNPSPVTAYGVYVGMKAAAKAGLGSEDLAGKTIAVQGVGNVAYHLCKYLHKEGANLIVTDIYKPSVDRAVTEFGAKAVAPDEIYQVDCDIFAPCALGGVINDETLTQIKAKVIAGAANNQLKEEKHGERLQEMGIAYAPDYVINAGGVINVADELNGYNRDRAFKKVEGIYENVSRVFEIAKAQNIPTFLAADKMAEERIERMRYARGTFLQNEHHILSRKK

SEQ ID NO: 435 - protein, 366 aa, Artificial Sequence
  Synthetic polypeptide
MTLEIFEYLEKYDYEQVVFCQDKESGLKAIIAIHDTTLGPALGGTRMWTYDSEEAAIEDALRLAKGMTYKNAAAGLNLGGAKTVIIGDPRKDKSEAMFRALGRYIQGLNGRYITQEDVGTTVDDMDIIHEETDFVTGISPSFGSSGNPSPVTAYGVYRGMKAAAKEAFGTDNLEGKVIAVQGVGNVAYHLCKHLHAEGAKLIVTDINKEAVQRAVEEFGASAVEPNEIYGVECDIYAPCALGATVNDETIPQLKAKVIAGSANNQLKEDRHGDIIHEMGIVYAPDYVINAGGVINVADELYGYNRERALKRVESIYDTIAKVIEISKRDGIATYVAADRLAEERIASLKNSRSTYLRNGHDIISRR

SEQ ID NO: 436 - protein, 362 aa, Actinomadura echinospora
MTNVFGSPHKGSGPSHEQVVFCQDEASGLRAIIAIYSTALGPSLGGTRFYPYGSEDEALTDVLNLSRAMAYKNALAGLDLGGGKAVIIGDPELDKSEALLRAYGRFVQSLNGRYYTACDVGTYSEDMDVIARESTYVTGRTVAHGGAGDSSVLTAYGVFQGMRAAAQALWGSPTLRGRRVGIEGVGKVGHRLVEHLREDGAEVVICDVSEAAVDRVRRLHPEVEVVADGDALVKTDLDVYSPCALGGSLNDETVPLLRARIVCGGANNQLAHPGVEKRLADRGILYAPDYVVNAGGVIQVADEIEGFSFERAKAKATQIFDTTARIFALAAEEGVPPAVAADRLAERRMTAVGRLRGIFLNG

SEQ ID NO: 437 - protein, 366 aa, Artificial Sequence
  Synthetic polypeptide
MTLEIFEYLEKYDYEQVVFCQDKESGLKAIIAIHDTTLGPALGGTRMWTYDSEEAAIEDALRLAKGKTYKNAAAGLNLGGAKTVIIGDPRKDKSEAMFRALGRYIQGLNGRYITAEDVGTTVDDMDIIHEETDFVTGISPSFGSSGNPSPVTAYGVYRGMKAAAKEAFGTDNLEGKVIAVQGVGNVAYHLCKHLHAEGAKLIVTDINKEAVQRAVEEFGASAVEPNEIYGVECDIYAPCALGATVNDETIPQLKAKVIAGSANNQLKEDRHGDIIHEMGIVYAPDYVINAGGVINVADELYGYNRERALKRVESIYDTIAKVIEISKRDGIATYVAADRLAEERIASLKNSRSTYLRNGHDIISRR

SEQ ID NO: 438 - protein, 366 aa, Artificial Sequence
  Synthetic polypeptide
MTLEIFEYLEKYDYEQVVFCQDKESGLKAIIAIHDTTLGPALGGTRMWTYDSEEAAIEDALRLAKGMTYKNAAAGLNQGGAKTVIIGDPRKDKSEAMFRALGRYIQGLNGRYITAEDVGTTVDDMDIIHEETDFVTGISPSFGSSGNPSPVTAYGVYRGMKAAAKEAFGTDNLEGKVIAVQGVGNVAYHLCKHLHAEGAKLIVTDINKEAVQRAVEEFGASAVEPNEIYGVECDIYAPCALGATVNDETIPQLKAKVIAGSANNQLKEDRHGDIIHEMGIVYAPDYVINAGGVINVADELYGYNRERALKRVESIYDTIAKVIEISKRDGIATYVAADRLAEERIASLKNSRSTYLRNGHDIISRR

SEQ ID NO: 439 - protein, 366 aa, Artificial Sequence
  Synthetic polypeptide
MTLEIFEYLEKYDYEQVVFCQDKESGLKAIIAIHDTTLGPALGGTRMWTYDSEEAAIEDALRLAKGMTYKNAAAGLNLGGAKTVIIGDPRKDKSEAMFRALGRYIQGLNGRYITAEDVGTTVDDMDIIHEETDFVLGISPSFGSSGNPSPVTAYGVYRGMKAAAKEAFGTDNLEGKVIAVQGVGNVAYHLCKHLHAEGAKLIVTDINKEAVQRAVEEFGASAVEPNEIYGVECDIYAPCALGATVNDETIPQLKAKVIAGSANNQLKEDRHGDIIHEMGIVYAPDYVINAGGVINVADELYGYNRERALKRVESIYDTIAKVIEISKRDGIATYVAADRLAEERIASLKNSRSTYLRNGHDIISRR

SEQ ID NO: 440 - protein, 366 aa, Artificial Sequence
  Synthetic polypeptide
MTLEIFEYLEKYDYEQVVFCQDKESGLKAIIAIHDTTLGPALGGTRMWTYDSEEAAIEDALRLAKGMTYKNAAAGLNLGGAKTVIIGDPRKDKSEAMFRALGRYIQGLNGRYITALDVGTTVDDMDIIHEETDFVTGISPSFGSSGNPSPVTAYGVYRGMKAAAKEAFGTDNLEGKVIAVQGVGNVAYHLCKHLHAEGAKLIVTDINKEAVQRAVEEFGASAVEPNEIYGVECDIYAPCALGATVNDETIPQLKAKVIAGSANNQLKEDRHGDIIHEMGIVYAPDYVINAGGVINVADELYGYNRERALKRVESIYDTIAKVIEISKRDGIATYVAADRLAEERIASLKNSRSTYLRNGHDIISRR

SEQ ID NO: 441 - protein, 366 aa, Artificial Sequence
  Synthetic polypeptide
MTLEIFEYLEKYDYEQVVFCQDKESGLKAIIAIHDTTLGPALGGTRMWTYDSEEAAIEDALRLAKGMTYKNAAAGLNLGGAKTVIIGDPRKDKSEAMFRALGRYIQGLNGRYMTAEDVGTTVDDMDIIHEETDFVTGISPSFGSSGNPSPVTAYGVYRGMKAAAKEAFGTDNLEGKVIAVQGVGNVAYHLCKHLHAEGAKLIVTDINKEAVQRAVEEFGASAVEPNEIYGVECDIYAPCALGATVNDETIPQLKAKVIAGSANNQLKEDRHGDIIHEMGIVYAPDYVINAGGVINVADELYGYNRERALKRVESIYDTIAKVIEISKRDGIATYVAADRLAEERIASLKNSRSTYLRNGHDIISRR

SEQ ID NO: 442 - protein, 366 aa, Artificial Sequence
  Synthetic polypeptide
MTLEIFEYLEKYDYEQVVFCQDKESGLKAIIAIHDTTLGPALGGTRMWTYDSEEAAIEDALRLAKGMTYKNAAAGYNLGGAKTVIIGDPRKDKSEAMFRALGRYIQGLNGRYITAEDVGTTVDDMDIIHEETDFVTGISPSFGSSGNPSPVTAYGVYRGMKAAAKEAFGTDNLEGKVIAVQGVGNVAYHLCKHLHAEGAKLIVTDINKEAVQRAVEEFGASAVEPNEIYGVECDIYAPCALGATVNDETIPQLKAKVIAGSANNQLKEDRHGDIIHEMGIVYAPDYVINAGGVINVADELYGYNRERALKRVESIYDTIAKVIEISKRDGIATYVAADRLAEERIASLKNSRSTYLRNGHDIISRR

SEQ ID NO: 443 - protein, 366 aa, Artificial Sequence
  Synthetic polypeptide
MTLEIFEYLEKYDYEQVVFCQDKESGLKAIIAIHDTTLGPALGGTRMWTYDSEEAAIEDALRLAKGMTYKNAAAGLNLGGAKTVIIGDPRKDKSEAMFRALGRYIQGLNGRYITAEDVGTTVDDMDIIHEETDFVTGISPSFGSSGNPSPVTAYGVYRGMKAAAKEAFGTDNLEGKVIAVQGVGNVAYHLCKHLHAEGAKLIVTDINKEAVQRAVEEFGASAVEPNEIYGVECDIYAPCALGATVNDETIPQLKAKVIAGSANNQLKEDRHGDIIHEMGIVYAPDYVINAGGAINVADELYGYNRERALKRVESIYDTIAKVIEISKRDGIATYVAADRLAEERIASLKNSRSTYLRNGHDIISRR

SEQ ID NO: 444 - protein, 366 aa, Artificial Sequence
  Synthetic polypeptide
MTLEIFEYLEKYDYEQVVFCQDKESGLKAIIAIHDTTLGPALGGTRMWTYDSEEAAIEDALRLAKGMTYKNAAAGLNLGGAKTVIIGDPRKDKSEAMFRALGRYIQGLNGRYITAEDVGTTVDDMDIIHEETDFVTGISPSFGSSGNPSPVTAYGVYRGMKAAAKEAFGTDNLEGKVIAVQGVGNVAYHLCKHLHAEGAKLIVTDINKEAVQRAVEEFGASAVEPNEIYGVECDIYAPCALGATVNDETIPQLKAKVIAGSANNQLKEDRHGDIIHEMGIVYAPDYVINAGGVINKADELYGYNRERALKRVESIYDTIAKVIEISKRDGIATYVAADRLAEERIASLKNSRSTYLRNGHDIISRR

SEQ ID NO: 445 - protein, 366 aa, Artificial Sequence
  Synthetic polypeptide
MTLEIFEYLEKYDYEQVVFCQDKESGLKAIIAIHDTTLGPALGGTRMWTYDSEEAAIEDALRLAKGMTYKNAAAGRNLGGAKTVIIGDPRKDKSEAMFRALGRYIQGLNGRYITAEDVGTTVDDMDIIHEETDFVTGISPSFGSSGNPSPVTAYGVYRGMKAAAKEAFGTDNLEGKVIAVQGVGNVAYHLCKHLHAEGAKLIVTDINKEAVQRAVEEFGASAVEPNEIYGVECDIYAPCALGATVNDETIPQLKAKVIAGSANNQLKEDRHGDIIHEMGIVYAPDYVINAGGVINVADELYGYNRERALKRVESIYDTIAKVIEISKRDGIATYVAADRLAEERIASLKNSRSTYLRNGHDIISRR

SEQ ID NO: 446 - protein, 364 aa, Bacillus subtilis
MELFKYMEKYDYEQLVFCQDEQSGLKAIIAIHDTTLGPALGGTRMWTYENEEAAIEDALRLARGMTYKNAAAGLNLGGGKTVIIGDPRKDKNEEMFRAFGRYIQGLNGRYITAEDVGTTVEDMDIIHDETDYVTGISPAFGSSGNPSPVTAYGVYRGMKAAAKAAFGTDSLEGKTIAVQGVGNVAYNLCRHLHEEGANLIVTDINKQSVQRAVEDFGARAVDPDDIYSQDCDIYAPCALGATINDDTIKQLKAKVIAGAANNQLKETRHGDQIHEMGIVYAPDYVINAGGVINVADELYGYNAERALKKVEGIYGNIERVLEISQRDGIPAYLAADRLAEERIERMRRSRSQFLQNGHSVLSRR

SEQ ID NO: 447 - protein, 366 aa, Artificial Sequence
  Synthetic polypeptide
MTLEIFEYLEKYDYEQVVFCQDKESGLKAIIAIHDTTLGPALGGTRMWTYDSEEAAIEDALRLAKGMTYKNAAAGLNLGGAKTVIIGDPRKDKSEAMFRALGRYIQGLNGRYITAEDVGTTVDDMDIIHEETDFVTGISPSFGSSGNPSPVTAYGVYRGMKAAAKEAFGTDNLEGKVIAVQGVGNVAYHLCKHLHAEGAKLIVTDINKEAVQRAVEEFGASAVEPNEIYGVECDIYAPCALGATVNDETIPQLKAKVIAGSANNQLKEDRHGDIIHEMGIVYAPDYVINAGGVINIADELYGYNRERALKRVESIYDTIAKVIEISKRDGIATYVAADRLAEERIASLKNSRSTYLRNGHDIISRR

SEQ ID NO: 448 - protein, 366 aa, Artificial Sequence
  Synthetic polypeptide
MTLEIFEYLEKYDYEQVVFCQDKESGLKAIIAIHDTTLGPALGGTRMWTYDSEEAAIEDALRLAKGMTYKNAAAGLNLGGAKTVIIGDPRKDKSEAMFRALGRYIQGLNGRYITAEDVGTTVDDMDIIHEETDFVTGISPSFGSSGNPSPVTAYGVYRGMKAAAKEAFGTDNLEGKVIAVQGVGNVAYHLCKHLHAEGAKLIVTDINKEAVQRAVEEFGASAVEPNEIYGVECDIYAPCALGATVNDETIPQLKAKVIAGSANNQLKEDRHGDIIHEMGIVYAPDYVINAGGVINVADERYGYNRERALKRVESIYDTIAKVIEISKRDGIATYVAADRLAEERIASLKNSRSTYLRNGHDIISRR

SEQ ID NO: 449 - protein, 363 aa, Staphylococcus massiliensis
MIFEKMEQYDYEQLVFCHDKTSGLKAIICIHDSTLGPALGGCRFWNYETEEEAIEDVMRLAKGMTYKNAAAGLNLGGAKTVVMGDPKKDKSEAFFRALGRYINSLDGRYITAEDVNTTVEDMDFIYQETPYVTGISESYGSSGNPSPKTALGVFYAMKRTAKEAFGTDDLEGKTVSVQGLGNVAYTLCEYLHEAGAKLVVTDINDEAVERVVNDFNAEKVGVDDIYSVEADIFAPCALGAILNDDTIPQLKVKAVCGSSNNQLLDTEKHGKMLEDKGIVYAPDFVVNAGGVINVADELQGYNEDRAIAKVKGIYNQMDKIFNIAKEQDILPVSAAEHLAEKRIKDMMVVHSKFSAKSNNQINR

SEQ ID NO: 450 - protein, 366 aa, Artificial Sequence
  Synthetic polypeptide
MTLEIFEYLEKYDYEQVVFCQDKESGLKAIIAIHDTTLGPALGGTRMWTYDSEEAAIEDALRLAKGMTYKNAAAGSNLGGAKTVIIGDPRKDKSEAMFRALGRYIQGLNGRYITAEDVGTTVDDMDIIHEETDFVTGISPSFGSSGNPSPVTAYGVYRGMKAAAKEAFGTDNLEGKVIAVQGVGNVAYHLCKHLHAEGAKLIVTDINKEAVQRAVEEFGASAVEPNEIYGVECDIYAPCALGATVNDETIPQLKAKVIAGSANNQLKEDRHGDIIHEMGIVYAPDYVINAGGVINVADELYGYNRERALKRVESIYDTIAKVIEISKRDGIATYVAADRLAEERIASLKNSRSTYLRNGHDIISRR

SEQ ID NO: 451 - protein, 366 aa, Artificial Sequence
  Synthetic polypeptide
MTLEIFEYLEKYDYEQVVFCQDKESGLKAIIAIHDTTLGPALGGTRMWTYDSEEAAIEDALRLAKGMTYKNAAAGLNLGGAKTVIIGDPRKDKSEAMFRALGRYIQGLNGRYWTAEDVGTTVDDMDIIHEETDFVTGISPSFGSSGNPSPVTAYGVYRGMKAAAKEAFGTDNLEGKVIAVQGVGNVAYHLCKHLHAEGAKLIVTDINKEAVQRAVEEFGASAVEPNEIYGVECDIYAPCALGATVNDETIPQLKAKVIAGSANNQLKEDRHGDIIHEMGIVYAPDYVINAGGVINVADELYGYNRERALKRVESIYDTIAKVIEISKRDGIATYVAADRLAEERIASLKNSRSTYLRNGHDIISRR

SEQ ID NO: 452 - protein, 366 aa, Artificial Sequence
  Synthetic polypeptide
MTLEIFEYLEKYDYEQVVFCQDKESGLKAIIAIHDTTLGPALGGTRMWTYDSEEAAIEDALRLAKGMTYKNAAAGLNLGGAKTVIIGDPRKDKSEAMFRALGRYIQGLNGRYITNEDVGTTVDDMDIIHEETDFVTGISPSFGSSGNPSPVTAYGVYRGMKAAAKEAFGTDNLEGKVIAVQGVGNVAYHLCKHLHAEGAKLIVTDINKEAVQRAVEEFGASAVEPNEIYGVECDIYAPCALGATVNDETIPQLKAKVIAGSANNQLKEDRHGDIIHEMGIVYAPDYVINAGGVINVADELYGYNRERALKRVESIYDTIAKVIEISKRDGIATYVAADRLAEERIASLKNSRSTYLRNGHDIISRR

SEQ ID NO: 453 - protein, 366 aa, Artificial Sequence
  Synthetic polypeptide
MTLEIFEYLEKYDYEQVVFCQDKESGLKAIIAIHDTTLGPALGGTRMWTYDSEEAAIEDALRLAKGMTYKNAAAGLNLGGAKTVIIGDPRKDKSEAMFRALGRYIQGLNGRYITAEDVGTTVDDMDIIHEETDFVTGISPSFGSSGNPSPVTAYGVYRGMKAAAKEAFGTDNLEGKVIAVQGVGNVAYHLCKHLHAEGAKLIVTDINKEAVQRAVEEFGASAVEPNEIYGVECDIYAPCALGATVNDETIPQLKAKVIAGSANNQLKEDRHGDIIHEMGIVYAPDYVINAGGVINSADELYGYNRERALKRVESIYDTIAKVIEISKRDGIATYVAADRLAEERIASLKNSRSTYLRNGHDIISRR

SEQ ID NO: 454 - protein, 366 aa, Artificial Sequence
  Synthetic polypeptide
MTLEIFEYLEKYDYEQVVFCQDKESGLKAIIAIHDTTLGPALGGTRMWTYDSEEAAIEDALRLAKGMTYKNAAAGLNLGGAKTVIIGDPRKDKSEAMFRALGRYIQGLNGRYITAMDVGTTVDDMDIIHEETDFVTGISPSFGSSGNPSPVTAYGVYRGMKAAAKEAFGTDNLEGKVIAVQGVGNVAYHLCKHLHAEGAKLIVTDINKEAVQRAVEEFGASAVEPNEIYGVECDIYAPCALGATVNDETIPQLKAKVIAGSANNQLKEDRHGDIIHEMGIVYAPDYVINAGGVINVADELYGYNRERALKRVESIYDTIAKVIEISKRDGIATYVAADRLAEERIASLKNSRSTYLRNGHDIISRR

SEQ ID NO: 455 - protein, 366 aa, Artificial Sequence
  Synthetic polypeptide
MTLEIFEYLEKYDYEQVVFCQDKESGLKAIIAIHDTTLGPAAGGTRMWTYDSEEAAIEDALRLAKGMTYKNAAAGLNLGGAKTVIIGDPRKDKSEAMFRALGRYIQGLNGRYITAEDVGTTVDDMDIIHEETDFVTGISPSFGSSGNPSPVTAYGVYRGMKAAAKEAFGTDNLEGKVIAVQGVGNVAYHLCKHLHAEGAKLIVTDINKEAVQRAVEEFGASAVEPNEIYGVECDIYAPCALGATVNDETIPQLKAKVIAGSANNQLKEDRHGDIIHEMGIVYAPDYVINAGGVINVADELYGYNRERALKRVESIYDTIAKVIEISKRDGIATYVAADRLAEERIASLKNSRSTYLRNGHDIISRR

SEQ ID NO: 456 - protein, 366 aa, Artificial Sequence
  Synthetic polypeptide
MTLEIFEYLEKYDYEQVVFCQDKESGLKAIIAIHDTTLGPALGGTRMWTYDSEEAAIEDALRLAKGMTYKNAAAGLNLGGAKTVIIGDPRKDKSEAMFRALGRYIQGLNGRYITAEDVGTTVDDMDIIHEETDFVTGISPSFGSSGNPSPVTAYGVYRGMKAAAKEAFGTDNLEGKVIAVQGVGNVAYHLCKHLHAEGAKLIVTDINKEAVQRAVEEFGASAVEPNEIYGVECDIYAPCALGATVNDETIPQLKAKVIAGSANNQLKEDRHGDIIHEMGIVYAPDYVINAGGCINVADELYGYNRERALKRVESIYDTIAKVIEISKRDGIATYVAADRLAEERIASLKNSRSTYLRNGHDIISRR

SEQ ID NO: 457 - protein, 366 aa, Artificial Sequence
  Synthetic polypeptide
MTLEIFEYLEKYDYEQVVFCQDKESGLKAIIAIHDTTLGPALGGTRMWTYDSEEAAIEDALRLAKGMTYKMAAAGLNLGGAKTVIIGDPRKDKSEAMFRALGRYIQGLNGRYITAEDVGTTVDDMDIIHEETDFVTGISPSFGSSGNPSPVTAYGVYRGMKAAAKEAFGTDNLEGKVIAVQGVGNVAYHLCKHLHAEGAKLIVTDINKEAVQRAVEEFGASAVEPNEIYGVECDIYAPCALGATVNDETIPQLKAKVIAGSANNQLKEDRHGDIIHEMGIVYAPDYVINAGGVINVADELYGYNRERALKRVESIYDTIAKVIEISKRDGIATYVAADRLAEERIASLKNSRSTYLRNGHDIISRR

SEQ ID NO: 458 - protein, 366 aa, Artificial Sequence
  Synthetic polypeptide
MTLEIFEYLEKYDYEQVVFCQDKESGLKAIIAIHDTTLGPALGGTRMWTYDSEEAAIEDALRLAKGMTYKNAAAGLNLGGAKTVIIGDPRKDKSEAMFRALGRYIQGLNGRYITAEDVGTTVDDMDIIHEETDFVTGISPSFGSSGNPSPVTAYGVYRGMKAAAKEAFGTDNLEGKVIAVQGVGNVAYHLCKHLHAEGAKLIVTDINKEAVQRAVEEFGASAVEPNEIYGVECDIYAPCALGATVNDETIPQLKAKVIAGSANNQLKEDRHGDIIHEMGIVYAPDYVINAGGVINAADELYGYNRERALKRVESIYDTIAKVIEISKRDGIATYVAADRLAEERIASLKNSRSTYLRNGHDIISRR

SEQ ID NO: 459 - protein, 366 aa, Artificial Sequence
  Synthetic polypeptide
MTLEIFEYLEKYDYEQVVFCQDKESGLKAIIAIHDTTLGPALWGTRMWTYDSEEAAIEDALRLAKGMTYKNAAAGLNLGGAKTVIIGDPRKDKSEAMFRALGRYIQGLNGRYITAEDVGTTVDDMDIIHEETDFVTGISPSFGSSGNPSPVTAYGVYRGMKAAAKEAFGTDNLEGKVIAVQGVGNVAYHLCKHLHAEGAKLIVTDINKEAVQRAVEEFGASAVEPNEIYGVECDIYAPCALGATVNDETIPQLKAKVIAGSANNQLKEDRHGDIIHEMGIVYAPDYVINAGGVINVADELYGYNRERALKRVESIYDTIAKVIEISKRDGIATYVAADRLAEERIASLKNSRSTYLRNGHDIISRR

SEQ ID NO: 460 - protein, 366 aa, Artificial Sequence
  Synthetic polypeptide
MTLEIFEYLEKYDYEQVVFCQDKESGLKAIIAIHDTTLGPALGGTRMWTYDSEEAAIEDALRLAKGMTYKNAAAGLNLGGAKTVIIGDPRKDKSEAMFRALGRYIQGLNGRYITAEDVGTTVDDMDIIHEETDFVTGISPSFGSSGNPSPVTAYGVYRGMKAAAKEAFGTDNLEGKVIAVQGVGNVAYHLCKHLHAEGAKLIVTDINKEAVQRAVEEFGASAVEPNEIYGVECDIYAPCALGATVNDETIPQLKAKVIAGSANNQLKEDRHGDIIHEMGIVYAPDYVINAGGVINVQDELYGYNRERALKRVESIYDTIAKVIEISKRDGIATYVAADRLAEERIASLKNSRSTYLRNGHDIISRR

SEQ ID NO: 461 - protein, 366 aa, Artificial Sequence
  Synthetic polypeptide
MTLEIFEYLEKYDYEQVVFCQDKESGLKAIIAIHDTTLGPALGGTRMWTYDSEEAAIEDALRLAKGMTYKNAAAGLNLGGAKTVIIGDPRKDKSEAMFRALGRYIQGLNGRYITAEDVGTTVDDMDIIHEETDFVTGISPSFGSSGNPSPVTAYGVYRGMKAAAKEAFGTDNLEGKVIAVQGVGNVAYHLCKHLHAEGAKLIVTDINKEAVQRAVEEFGASAVEPNEIYGVECDIYAPCALGATVNDETIPQLKAKVIAGSANNQLKEDRHGDIIHEMGIVYAPDYVINAGGTINVADELYGYNRERALKRVESIYDTIAKVIEISKRDGIATYVAADRLAEERIASLKNSRSTYLRNGHDIISRR

SEQ ID NO: 462 - protein, 366 aa, Artificial Sequence
  Synthetic polypeptide
MTLEIFEYLEKYDYEQVVFCQDKESGLKAIIAIHDTTLGPALGGTRMWTYDSEEAAIEDALRLAKGMTYKNAAAGLNLGGAKTVIIGDPRKDKSEAMFRALGRYIQGLNGRYYTAEDVGTTVDDMDIIHEETDFVTGISPSFGSSGNPSPVTAYGVYRGMKAAAKEAFGTDNLEGKVIAVQGVGNVAYHLCKHLHAEGAKLIVTDINKEAVQRAVEEFGASAVEPNEIYGVECDIYAPCALGATVNDETIPQLKAKVIAGSANNQLKEDRHGDIIHEMGIVYAPDYVINAGGVINVADELYGYNRERALKRVESIYDTIAKVIEISKRDGIATYVAADRLAEERIASLKNSRSTYLRNGHDIISRR

SEQ ID NO: 463 - protein, 366 aa, Artificial Sequence
  Synthetic polypeptide
MTLEIFEYLEKYDYEQVVFCQDKESGLKAIIAIHDTTLGPALGGTRMWTYDSEEAAIEDALRLAKGMTYKNAAAGINLGGAKTVIIGDPRKDKSEAMFRALGRYIQGLNGRYITAEDVGTTVDDMDIIHEETDFVTGISPSFGSSGNPSPVTAYGVYRGMKAAAKEAFGTDNLEGKVIAVQGVGNVAYHLCKHLHAEGAKLIVTDINKEAVQRAVEEFGASAVEPNEIYGVECDIYAPCALGATVNDETIPQLKAKVIAGSANNQLKEDRHGDIIHEMGIVYAPDYVINAGGVINVADELYGYNRERALKRVESIYDTIAKVIEISKRDGIATYVAADRLAEERIASLKNSRSTYLRNGHDIISRR

SEQ ID NO: 464 - protein, 366 aa, Artificial Sequence
  Synthetic polypeptide
MTLEIFEYLEKYDYEQVVFCQDKESGLKAIIAIHDTTLGPALGHTRMWTYDSEEAAIEDALRLAKGMTYKNAAAGLNLGGAKTVIIGDPRKDKSEAMFRALGRYIQGLNGRYITAEDVGTTVDDMDIIHEETDFVTGISPSFGSSGNPSPVTAYGVYRGMKAAAKEAFGTDNLEGKVIAVQGVGNVAYHLCKHLHAEGAKLIVTDINKEAVQRAVEEFGASAVEPNEIYGVECDIYAPCALGATVNDETIPQLKAKVIAGSANNQLKEDRHGDIIHEMGIVYAPDYVINAGGVINVADELYGYNRERALKRVESIYDTIAKVIEISKRDGIATYVAADRLAEERIASLKNSRSTYLRNGHDIISRR

SEQ ID NO: 465 - protein, 366 aa, Artificial Sequence
  Synthetic polypeptide
MTLEIFEYLEKYDYEQVVFCQDKESGLKAIIAIHDTTLGPALGGTRMWTYDSEEAAIEDALRLAKGMTYKNAAAGKNLGGAKTVIIGDPRKDKSEAMFRALGRYIQGLNGRYITAEDVGTTVDDMDIIHEETDFVTGISPSFGSSGNPSPVTAYGVYRGMKAAAKEAFGTDNLEGKVIAVQGVGNVAYHLCKHLHAEGAKLIVTDINKEAVQRAVEEFGASAVEPNEIYGVECDIYAPCALGATVNDETIPQLKAKVIAGSANNQLKEDRHGDIIHEMGIVYAPDYVINAGGVINVADELYGYNRERALKRVESIYDTIAKVIEISKRDGIATYVAADRLAEERIASLKNSRSTYLRNGHDIISRR

SEQ ID NO: 466 - protein, 366 aa, Artificial Sequence
  Synthetic polypeptide
MTLEIFEYLEKYDYEQVVFCQDKESGLKAIIAIHDTTLGPALYGTRMWTYDSEEAAIEDALRLAKGMTYKNAAAGLNLGGAKTVIIGDPRKDKSEAMFRALGRYIQGLNGRYITAEDVGTTVDDMDIIHEETDFVTGISPSFGSSGNPSPVTAYGVYRGMKAAAKEAFGTDNLEGKVIAVQGVGNVAYHLCKHLHAEGAKLIVTDINKEAVQRAVEEFGASAVEPNEIYGVECDIYAPCALGATVNDETIPQLKAKVIAGSANNQLKEDRHGDIIHEMGIVYAPDYVINAGGVINVADELYGYNRERALKRVESIYDTIAKVIEISKRDGIATYVAADRLAEERIASLKNSRSTYLRNGHDIISRR

SEQ ID NO: 467 - protein, 366 aa, Artificial Sequence
  Synthetic polypeptide
MTLEIFEYLEKYDYEQVVFCQDKESGLKAIIAIHDTTLGPALGGTRMWTYDSEEAAIEDALRLAKGMTYKDAAAGLNLGGAKTVIIGDPRKDKSEAMFRALGRYIQGLNGRYITAEDVGTTVDDMDIIHEETDFVTGISPSFGSSGNPSPVTAYGVYRGMKAAAKEAFGTDNLEGKVIAVQGVGNVAYHLCKHLHAEGAKLIVTDINKEAVQRAVEEFGASAVEPNEIYGVECDIYAPCALGATVNDETIPQLKAKVIAGSANNQLKEDRHGDIIHEMGIVYAPDYVINAGGVINVADELYGYNRERALKRVESIYDTIAKVIEISKRDGIATYVAADRLAEERIASLKNSRSTYLRNGHDIISRR

SEQ ID NO: 468 - protein, 366 aa, Artificial Sequence
  Synthetic polypeptide
MTLEIFEYLEKYDYEQVVFCQDKESGLKAIIAIHDTTLGPALGGTRMWTYDSEEAAIEDALRLAKGMTYKNAAAGLNLGGAKTVIIGDPRKDKSEAMFRALGRYIQGLNGRYQTAEDVGTTVDDMDIIHEETDFVTGISPSFGSSGNPSPVTAYGVYRGMKAAAKEAFGTDNLEGKVIAVQGVGNVAYHLCKHLHAEGAKLIVTDINKEAVQRAVEEFGASAVEPNEIYGVECDIYAPCALGATVNDETIPQLKAKVIAGSANNQLKEDRHGDIIHEMGIVYAPDYVINAGGVINVADELYGYNRERALKRVESIYDTIAKVIEISKRDGIATYVAADRLAEERIASLKNSRSTYLRNGHDIISRR

SEQ ID NO: 469 - protein, 366 aa, Artificial Sequence
  Synthetic polypeptide
MTLEIFEYLEKYDYEQVVFCQDKESGLKAIIAIHDTTLGPALGGTRMWTYDSEEAAIEDALRLAKGATYKNAAAGLNLGGAKTVIIGDPRKDKSEAMFRALGRYIQGLNGRYITAEDVGTTVDDMDIIHEETDFVTGISPSFGSSGNPSPVTAYGVYRGMKAAAKEAFGTDNLEGKVIAVQGVGNVAYHLCKHLHAEGAKLIVTDINKEAVQRAVEEFGASAVEPNEIYGVECDIYAPCALGATVNDETIPQLKAKVIAGSANNQLKEDRHGDIIHEMGIVYAPDYVINAGGVINVADELYGYNRERALKRVESIYDTIAKVIEISKRDGIATYVAADRLAEERIASLKNSRSTYLRNGHDIISRR

SEQ ID NO: 470 - protein, 366 aa, Artificial Sequence
  Synthetic polypeptide
MTLEIFEYLEKYDYEQVVFCQDKESGLKAIIAIHDTTLGPALGGTRMWTYDSEEAAIEDALRLAKGMTYKNAAAGLNLGGAKTVIIGDPRKDKSEAMFRALGRYIQGLNGRYITAEDVGTTVDDMDIIHEETDFVTGISPSFGSSGNPSPVTAYGVYRGMKAAAKEAFGTDNLEGKVIAVQGVGNVAYHLCKHLHAEGAKLIVTDINKEAVQRAVEEFGASAVEPNEIYGVECDIYAPCALGATVNDETIPQLKAKVIAGSANNQLKEDRHGDIIHEMGIVYAPDYVINAGGVINTADELYGYNRERALKRVESIYDTIAKVIEISKRDGIATYVAADRLAEERIASLKNSRSTYLRNGHDIISRR

SEQ ID NO: 471 - protein, 366 aa, Artificial Sequence
  Synthetic polypeptide
MTLEIFEYLEKYDYEQVVFCQDKESGLKAIIAIHDTTLGPALGGTRMWTYDSEEAAIEDALRLAKGMTYKNAAAGTNLGGAKTVIIGDPRKDKSEAMFRALGRYIQGLNGRYITAEDVGTTVDDMDIIHEETDFVTGISPSFGSSGNPSPVTAYGVYRGMKAAAKEAFGTDNLEGKVIAVQGVGNVAYHLCKHLHAEGAKLIVTDINKEAVQRAVEEFGASAVEPNEIYGVECDIYAPCALGATVNDETIPQLKAKVIAGSANNQLKEDRHGDIIHEMGIVYAPDYVINAGGVINVADELYGYNRERALKRVESIYDTIAKVIEISKRDGIATYVAADRLAEERIASLKNSRSTYLRNGHDIISRR

SEQ ID NO: 472 - protein, 363 aa, Unknown
  Streptomyces sp. CB02923
MQGAPSADGSVLHTLFRSEQGGHEQVVLCQDRASGLRAVIAIHDTALGPALGGTRFHAYASEEDAVLDALNLSRGMSYKNALAGLDHGGGKAVIIGDPELIKTEELLLAYGRFVASLGGRYVTACDVGTYVADMDVVARTNQWTTGRSPENGGAGDSSVLTAFGVFQGMRASAQHLWGDPTLRGRKVGVAGVGKVGHHLVEHLLQDGAEVVITDVRAESIERVRSRHPQVGVAADTGSLIRTAGLDVYAPCALGGALNDESVPALTAKVVCGAANNQLAHPGVEKDLSDRGVLYAPDYVVNAGGVIQVADELHGFDFDRCKTKAAKIFDTTLAIFARAKEDGIPPAAAADRLAEQRMADARRA

SEQ ID NO: 473 - protein, 354 aa, Natranaerobius thermophilus
MKILETMKASDYEQLVFCQDEKTGLKGIIAIHDTTLGPALGGTRMWTYDNEEEAIEDVLRLARGMTYKSAAAGLNLGGGKGVIIGDPKKDKSEEMWRAFGRFVQSLNGRYITAEDVGVRETDLEIVNTETDFAVGLPGKSGNPSPATAYGVYSGIKAVADEIWGSADLNGKTIAIQGAGSVGYYLSELLHKDGAKLIVTDIDKEAVDKLVSDFGATAVETDEIYEQEADIFAPCALGAILNDETIPKLKVKAVAGAANNQLEDEKRHAEELKKRGIVYAPDYVINAGGVINVSFELTGYDEERAYRKISTIYDNIKKIFNIANRDDITSHEAANRMAEERIEAIKHVKTSYINK

SEQ ID NO: 474 - protein, 366 aa, Artificial Sequence
  Synthetic polypeptide
MTLEIFEYLEKYDYEQVVFCQDKESGLKAIIAIHDTTLGPALEGTRMWTYDSEEAAIEDALRLAKGMTYKNAAAGLNLGGAKTVIIGDPRKDKSEAMFRALGRYIQGLNGRYITAEDVGTTVDDMDIIHEETDFVTGISPSFGSSGNPSPVTAYGVYRGMKAAAKEAFGTDNLEGKVIAVQGVGNVAYHLCKHLHAEGAKLIVTDINKEAVQRAVEEFGASAVEPNEIYGVECDIYAPCALGATVNDETIPQLKAKVIAGSANNQLKEDRHGDIIHEMGIVYAPDYVINAGGVINVADELYGYNRERALKRVESIYDTIAKVIEISKRDGIATYVAADRLAEERIASLKNSRSTYLRNGHDIISRR

SEQ ID NO: 475 - protein, 366 aa, Artificial Sequence
  Synthetic polypeptide
MTLEIFEYLEKYDYEQVVFCQDKESGLKAIIAIHDTTLGPALGGTRMWTYDSEEAAIEDALRLAKGMTYKKAAAGLNLGGAKTVIIGDPRKDKSEAMFRALGRYIQGLNGRYITAEDVGTTVDDMDIIHEETDFVTGISPSFGSSGNPSPVTAYGVYRGMKAAAKEAFGTDNLEGKVIAVQGVGNVAYHLCKHLHAEGAKLIVTDINKEAVQRAVEEFGASAVEPNEIYGVECDIYAPCALGATVNDETIPQLKAKVIAGSANNQLKEDRHGDIIHEMGIVYAPDYVINAGGVINVADELYGYNRERALKRVESIYDTIAKVIEISKRDGIATYVAADRLAEERIASLKNSRSTYLRNGHDIISRR

SEQ ID NO: 476 - protein, 362 aa, Unknown; identical to SEQ ID NO: 10
  'Candidatus Kapabacteria' thiocyanatum

SEQ ID NO: 477 - DNA, 1647 bp, Artificial Sequence; identical to SEQ ID NO: 30
  Synthetic polynucleotide

SEQ ID NO: 478 - DNA, 1638 bp, Artificial Sequence
  Synthetic polynucleotide
atgaagaaaaaaatctctcaattcatttttgacgaaatcgagaggcatggcgtcgatacgatattcggggttccgggtgactttaacttggcgttccttgatgacattgtggcacaccctaaattagaatgggttggtaataccaacgaactgaacgctgcctatgctgcggatggctacgctcgtctgaaaggtctctcggccatggtaactactttcggcgtaggtgagctgagtgcagtgaacggcatcgctggatcctacgctgaacgcgttccggtcatcgcgattaccggtgggccaacaactgtagttgaaaaggcaggcaaatacgtgcaccatagcctgggtgaaggtgtattcgatgtttatcagaaaatgtaccagcacatcaccgtcgcgcagacctacgttactcccgagaacgccctgaccgaaattccacgtgtgatccaggctgctctggacgaaaagcgcccggttcatattcacctaccgatcgacacagcaatggtggaaatcgacgtaccggatacggaacagccttcaaaagaagaggaaatcactgctaccgagtggctgactgttctggagcacaaactgcaacaggcaaaacaacccaccctgatcgtcggtcacgaaattaactcttttcgtctgcaacatgaggttaaagccctggtagatcagcttggcctgccagtggcacagctcagccttggcaagagcgcctttgatgaaactcacccgaattatatgggcatctatgacggttccatcgcgcacccggctatcaaagattacgttgatcactctgacctggttatcacgctcggtgctaaactgaccgatagcgcgacggcgggcttctcctaccagttcgcggacgaacagattgtgaccctgaaccataaaaacattcaggtagacgaagttactgttgagtctatggctctgccggaaattgtctcccagatgtcgaaattaaattctcatttcgacggagaatggccgcaatgtgaacgtccgagcaactctgaagtggtagttgatgacgcccctctgacccagcagcattatttcgagctgatgcagcagtttatcaagcctaacgatgttctgatcgcagaacagggtacgtcgttctttggggcctacgatcttgttctgccgcagggcgtaaccttcatcggccaaccgctgtggggttcaatcggttacaccttcccggctaccctgggcactcagctggcggaccgccaccgtcgaaatatcctgctgatcggagacggttctcttcaactgactgtccaggatatggcaacgatgttacgtcagaacatccaccccattatcttcattatcaacaatgacggttatactgttgaaagaaaaattcacggtgaaaacgaaccgtacaacgatatcagcaagtgggattatcatctgttgccgactgttttcggccataaagaaacccccacctaccaagtatctacctccaaagcgttgaaggaggtgatggataaagtgaacgaacagccgcagtccatgcacgtcatcgaagtttttatggataagcacgacgctcctgagaaactgactaacatagccaaagctttcgcgacccaaaacaag

SEQ ID NO: 479 - DNA, 1641 bp, Artificial Sequence
  Synthetic polynucleotide
atgacactgacggtaattcaacacgtcttggagcgcctgaaagcgatcggcatcagcgacgtgtttggggttccgggtgattacgccttcccagttaatgacgctatttgcaacgatcctgctatgcgttggatcggttgtgcaaacgaactcaacgcagcgtatgctgcggatggctacgctcgtataaagggtatggccgctctttgcactacttatggcgtaggtgaactgtccgcaatcaacggcattgctggagcttacgccgaacatctgccgatcttccacctagtgggtgcgccgggcatggcagttcagacctcaaggcgcgcgatgcaccataccctgggtaatggtgagtacgacttatttcaccgtatgtctgaacccgtcgtttgcgcacacgccgtgatgaccccgcagaacgttgcttatgaaactgaacgtctgattgcggaggctctgttccatcggcgcccagtatacatggtgttcccggccgactacgcaaaccagccggttctgggcagtgctgaacctatccgtgcacctggctccaatgccgaagctctggaagcagctgttgccgcgatcgttgcggctttagataaagcagaaactgcgtgtgtgctgcccgggatccttatagcccgttctggcctgaaagctgcgatgcaagctgtaatcgataaaagcggtctgccattcgcaaccatgttcatggacaagagcgtcctggatgaacagcaggctggatttgttggtatgtatgacggtgcgattatgtccgaggaagtacgcggcttcgtagaagggtctgaccaggttctggcaatcggcacccttgcgtcggatttcaacacgggagcttttactgctcgtttggacccggcacgcactatcagtattggtcaccatcacgtccatgtgggcggtaaaacctacgcgaacattgaactgggtgacgttctggaagcgctgagccgtaaattgaccaaacgaaactggaaacgtatcccggctgtttctctgggcgtaaaatctggcaagggtaatgacccgattacagtggaggcattgtatccgagatgggcggagtttttaaaaccggaagatatcgttatcggcgaaactggtactgcgtcgatgggtctgggcttcgctctgattccgaagggagcaaccttccacaaccagactctgtggggttctatcggctgggcgacgccggccgctgtgggcgccgctgctgccgccccagataggcgtgttgtactggtcaccggtgatggttctcaccagcttactgctcaagagatcggtcagtttggccgactcggcctgaaacccgttgttttcgttctcaacaacgatgggtacctgatcgaacgcctgctgtgcaaagacccggagattgcttataacgatatcgctccatggcgttacaccgaactgccacacgcgctaggctgtgatggctggttcactgcacgcgtgaccacctgcgcagagtttgacgaagcactggagcaagccggtaaagctgacagcggtgtgtacattgaagtcgtaaccgacgcttacgcggcctccccgctggcgatgaaactgcacgaatcaatggcaagcctgtacaaggcc

SEQ ID NO: 480 - DNA, 1650 bp, Artificial Sequence
  Synthetic polynucleotide
atgtcgagctacacagttggtgactatttgctggcccgcttacaggcatgcggcatccgacacctcttcggagtgccaggtgattttaatctgcaattcctggaccgtgtaattgcgcatcctactatctcatgggtcggctgtgctaacgagctgaacgctgcttacgcggcagatggttatggccgctgctctggcatggctgcacttctgaccacttttggtgttggggaactgtctgcgattaacggtctggcaggctccttcgccgaatacgtgccggtaatccacatagttggggctccgagtagccaggctatgcagcagggtgactgcgtacatcacacgttaggcgatggagacttcggtcacttcatccgtatggccaaggaagttaacgtggcgaccgcgcaactgactgcggagaatgctaccgctgaaattgatcgggttctgtcctctgtcatccagcagcaccgtccgggttatctgctcctgcccgtcgacgtagcgcaggctgaaacggcagcaccagtgcatccgttggtttctagcgcctccagcccggaaagtctgcgttccgcttttcgccaggctgcggaacgtctgctggcccctgctcagcgtgtatctttactggccgatttcctagctcaaaggtggcagcagcagccagctctggcagcactgcgtgcacgcagagctttcccgtgtgccacgctcctgatgggcaaaggcgttctcgatgagcaacagccgggttttgtgggtacctacgcgggcgaaggctctgaaggccgtgttcgccagcaaatcgaagaggcggacgtaaccctatgcgttggtgtgcgttttactgacaccataactgcgggcttcactcagcagttccgcccggatcgcctgatcgacgtccaaccgcattctgcaagcgttgctggtcagacgtttgctcctctgtccatggctgatgccctgcaaaccttgcttccactgttcgaacgctacggtgcgggttggcagtcagcggggccggttaaaccggcagctcctgtgccggatgcagcaattatctcccagagcgcgttctggcaggcaatgcagagttttattcagccgggcgacatcatcctggctgaccagggcactgcggctttcggtgctgctgcgctgcgtctgccagcaggagcccagcttctggtgcaacctctgtggggtagcatcggctacaccctgccggccgccttcggagcacagaccgcccgtccgtcccagagggtaattctgatcattggtgatggctctgcacaactgactattcaggagttgggttctatgctgcgtgatgatcagcacccgatcatcttcttactgaacaacgagggttatacagtagaacgagctatccacggcgctgaccagcgttacaacgacatcgctcaatggaactggaccgctcttccgcaagctttctctctgcattgccaggctcagtcctggcgcattagcgaaactgttcagctgactgctctgatggctcagctgacccaacagcaccgtctgtcttttatcgaggttgtaatgcaaaaagatgaccttccccctctgctgcgcaaagttagcgcgtgtttatcgcagcggaatggtggc

SEQ ID NO: 481 - DNA, 1650 bp, Artificial Sequence
  Synthetic polynucleotide
atgcagcaaacggtaattgaactgcttatcgcacgcctgaaagagatcggcattacagacgtgtttggggttccgggtgatttcgccttcgcgctcaatgacgctattgataacgaccctgatatgcgttggatcggttgcactaacgaactgaacgctgcatatgctgcggatggctacgcccgtatcaagggtcgagctgctttgtgtaccacttacggcgtcggtgaactgtcagcactgtgcggcgttgcgggatcttataccgagcatctgccggtattccacttagtgggtatgccaagcatcagtactcagcagtcccggcgtatagtccaccataccctgggtgacggtctgtttgatgctttctcgaccatgactaaaccggttgtttgcgcgagcgcaatcctcacagctgaaaacgccgcttgtcaaattgaacgctgcatcgaggcggccatcgcgcgcaaccgtcccgtatacatggcactaccgcaggaccaggcagacaaaccactgccgggccagtacgtgtgtgcacctgaagctccggtttctaatccaccggtgctggccgctgctattgaagcgatcgtagaaaaaattaccgccgctggttccactgtcgttttagcgggctatctgatcgctcgtctgggcctgcgcagcgctgctcacgaactgcttactcgtacggggttgccgtacgccaccatgtttatggataagaccgcactagatgaaacgcatccgtcttatatcggcttgtacgacggaagaatcatgaaccctgaggttcgtgacttcgttgagggttgcgactgcgtactgaatctgggcgcccagtggtctgacttcaacacgggtgcgtttactgcacacatagatccgtcccgtatgatcgcagtcatgcaacacgaagttcgggtgggtcatgcagttttcgctcacgttgaaatgcgcgatgtcctggcgggcctggctcgtgttctgccccacaaaccggctagtgggcctcgtgctaaaggactgggtcagcctaagggcgctcccggggatccaattaccccggactacttatacccgcgctgggaacagtttctgcgcccaggcgatgtggtgatggcagaaactggtacggtaagcatgggcctgggtttcgccttaatgccgcagggcgcggagttcttcaaccaaaccctgtggggtgcaatcggttgggcgaccccggcgagctttggcgcagcgctggcagcgccggaacgtcgtactctgctgttcaccggagagggttctcaccagatgactgctcaggaattaggccagtttggtatgcatggcctgaaaccgattgtattctgtctgaacaatgacggttatctgattgaaaggctgctttgcaaaaacccgctgtcctcgtacaacgatctggcgccgtggaactatgctcaactgcccgctgcgtttggcctgactgactggtactgcgctaaagttaccaccaatgcggaactagagcaggccctcgctaaggcagaaacctgcggcactggtgcttacatcgaagttgtaatggatcgcatggctgcatctccgcttgcccaaaaactgggcgaatctatcaaaaccttatacgcgagcgccaaa

SEQ ID NO: 482 - DNA, 1641 bp, Artificial Sequence
  Synthetic polynucleotide
atgcgcagacggatcggtcaatacctcatggactgtctgtctaacgtcggcgtagataaggtgtttggggttccgggcgacttcaatttgacgttccttgatgacattataggtcgtactgatatggagtggatcggtaacaccaacgaactgaacgcctcgtatgctgcggatggctacgcacgtatgaaaggcatttcagctatggttaccacttttggtgtaggtgaactgagtgctgtgaatggcatcgcaggagccttcgcagaacgtgttccagtcatccagattacaggcgcgcccacccaggccgttgaacaggctggaaaatacgtgcaccattccctgggtgagggtaacttcgacgattatcgcaaaatgtacgaaccgatcactaccacccaggcgtacatcactgaagacaacgctcaactggaaattcctcgtgtaatcaacgcggctctgacggagagccgcccggttcacattcacttaccgatcgacgtagcagcgaaggaaatcgaggttaaagaagactatcattataaaatgtctaaaccagctgatgttagccagtacattgatatggtacaggctaagctgaatagcgctgaacgtccggtgatcattacgggccatgagatcaactctttcggcctgcacgaattgttagaacagtttgttaaccagaccgggattccggtcgcccaactgtccctgggtaaaggtgcctttaatgaagagtctccgtactatatgggcatctacgatggttcgatcgcagaagaacgcatcaaatactacgttgaccacagcgacgctatcctgaacattggtgccaagctaactgactcagcgacagctgggttctcctatcagttcgacatcgatgatgtgataatgctgaaccatcgaaactttaaaatgaatgaaactcgtgacgataacgttgcactccaggatctgctgatcggcctgcaacgtattgatttccacttcaacggcgattaccctatgtttaaaaaaccggtacccaatgacgacgttttagacgatactccgctgacccagcagacttacttcaaaatgatgcaggatttcctgaaccgcgacgatgtggtcatcgctgaacaagggacctcttttttcggtgcgtatgatttggcgctgacaaaaaccaacaagttcatcggtcagccgctttggggcagcattggatacaccctgccggcgactctgggcagtcagctggcggacggtgagcgtcgtaacgtgctgctgatcggcgatggttccctccagctgactgtacaagaaatggcaactatgattcgcctgcaacttaaaccagtgatcttcatcattaacaatgatggctataccgtggaacgtaagattcacggcgaaaacgcactgtacaacgacataccgatgtgggattacaaagctctccctagtgtttttggcggtaacgaaaccgtgtctgttcatgaagtcgacagctctgtatccctgcaacatgcattcaatgagatcaacctccagcctaaccgcatgcacgttatcgaagtaaaaatgggcatgcacgatgcccctgagaagctgaacgacatcgggaaagctttcgcgaaacagaatggt

SEQ ID NO: 483 - DNA, 1761 bp, Artificial Sequence
  Synthetic polynucleotide
atggcagcgccgacaatttgtatgggccaataccttttccgtaggatcaagcagctggggacggaacacatcctgggtgtccccggcgattttaacttgaccctcttagacgagatctataatgtttcgggtctgaaatggattggatgctgcaacgaactgaacggtgcctacgctgctgacggctacactcgcatcaaaggttcccctgctgtgctggtaactacctatgcagttggcgaactatctgccatgaacggtgtggcgggggcttacgcagagcatgcgggcatgatacacattgtaggtatgccagcaagaagcatgcagaaagctcgcgctatgctgcatcacaccatgaaagctaatatggatcacgcgacttacatccatatggccgcaccgatccgtgaaacccacgcttatttaatggacgataagatcatggcagaagaaatcgaccgtactattgttgcgtgtgtccgttcacgcctgccggtttatatctacgtaccggttgatgctgtgcaggtacaactggacgccaaacgtctcgagaccccgctggatgttggcgtgcataacggtgatggcaaaattgaagaccagattgtatcctctatactgagtctgatcgaaaaagcgagcgacccagtgattttagctgatgttctgactgtccgccacggtggccgtgaactggcgcgtgagctggcggaactgactcagttcgcatcttacagcaccccgctgtctaagggtgttatcgacgaaaccttgccatattacaacggcctatacaatggaaaagtttcctttcctggtgttgctgaggccatcgagcacagcgacctggtgctgaacctgggtccgctgctgtcagatagtaacacgggcggcttcacgcgcgaaatcaaggatgattacttagtgttgcttggtcacgattcctgccaggtcaaagaccagaaattctatggtgttcattttctgccgatcctgaaaaaacttgtcacagaactgaaagctaacccgcaaaaatacaacttgccacgcccgcagaaagctccgcggactgagacccccgttctgaacgatctgaagtctggagaaatcaaacagtcctacgtatggcaacggctgggccgtttcttacgcaaggacgacatcctgctggtagaatccggcacggctcaattcggcatgccggacgcgaccttcccgcctaacgtaaagctgattacacagactttttggtctagcataggcttcaccgtgggtgcctgctttggtgcactcatcgctgctaaagaacttaaatatgcaggccgtgttgttctgattgtgggtgaaggctctctgcaaatgactgttcaggaaattgggtcttacatccgttatggtttcaaacccatcatcttcgttattaataacaatggctatgccatcgaacgtgcgattcacggtccggagcagggctacaacgatgttagcatgatgtgggactaccagaaaatgctgggttttttcggcgctcgcgaagataccggtgttaaagcgaaaagtcgggctactaaaacagtcgaagaactggaggcagtactcaaggacgatgatttcgcgagcggcaattcgatccagctgtgcgaaatctttatggacacgttcgactatccgtggcgactgactgagcagattgctatcagccgtgcacgtaccaaacgcgatgcagacaaactgactgccgctagcggtgaagcg

SEQ ID NO: 484 - DNA, 1785 bp, Artificial Sequence
  Synthetic polynucleotide
atgccaagcacggtaaaattggcggagtatctgtttacacgtctgcatcagcttggggtgaggtccatccacggcgtccctggtgactacaacctgactctgctcgatcacattgaaccctctggtctgcactgggttggcaattgcaacgaactgaacgccggttacgcagctgatggctatgctcgcatcaacggtttgggcgcattaatcactaccttcggtgttggagaactgtcagcggtcaatgctattgcaggcgcttactgtgagcgtagtgccgtggtacatgttgttgggaccccggaacgctctgttcaagacagccgtctgaaggtgcaccataccttcgcggatggcaactttgaccgcttcgctcagatgcacgcacagataactgtagcgcaggcgtccctgtgggacccgctgatggctccagaacaaatcgatgctgtgctgcgtcagtgcctgctgcaatcccgtcctgtctacattcaggttccggtagacctagttgatgcgccggtggaagcagatagattgtattctcagtgcctctcggctgctgtaaccagcatgaactctactatcactccggcccatgacaccgttctttctctggttctgaaaaaaatcaaaactgcgaagcacccggcaatcctggtagacggtgaaagtcgcgccctgggtattacggaggatgtgcagcatatcgtgcgtctgaccaaatggccgacttgggttaccgttttcggcaaaggtctggttgacgaaacggcaccgaacgttcacggcgtctaccgaggctcatacgatccgaaggctaaagcatttgtcgattcaagcgacttggtgctgtgcttcggtccgcacttttccactacgaacaccttcgatagcacatctattccacctcaggctgttaccatctcttataccgataacgaagttcgtatcggtgcacaaattttccgggacgtacgtgctcgtgctgccgtaagcggactccgcgaggaactctctgccctggcgccaactttaccggcagttcctgggccggaactgccggaaaaacatcctatggtgtgtcactccctgttaccgagtaaacagaaagtcacacaggaccgtctgtggagggtactggctaactcgatccgtccgggtgacatcgtgctgggcgagacaggcaccgctggttacggtgttcaggaaatgagcctgccgcaggacacccgcgtcttcgcgccagtgacgtggctgtccatcggctacatgctgccagcggcgcaaggtgccgctctggcacagcgcgatttactgctgtctgctcccagccgctcgaatggcgatactaagcccgcacgtcctcgtactgttctgtttattggggacggtagctttcagatgaccgttcaggagctatccactataatccgtgaacgtcttgatgtggttattttcttactaaataacgacggctatactatcgaacgctgcattcacggcctgcgtaaatcttacaacgatgtagcgccgtggcgctatctgcaagctccgagcttcctgggagctgaggctgacgatgacgatgacgacgatgtctttaccgcgaccgttcgtgactggggtgatctgcaacgcgtgctggcctccaaagaaatgacctcgggtaagggcctgcggatggtggaaatcgttctggaccgtgaagatgtcctcgagggcccgctgctggacttgctgcaagaagaacgcaaagttgctcttgggggtgcatctcag

SEQ ID NO: 485 - DNA, 1662 bp, Artificial Sequence
  Synthetic polynucleotide
atgaagaaagactacactattggggattatctgttggaccgtctggcccagatcggcgtgcaacatgtatttggtgtccccggcgattacaacctcatgttccttgatgaggttctgaaacacaaagaactggaatggatcggtaattgtaacgaattaaacgctgcatacgctgcggacggttatgcgcgcctgaatggcattggcgctgttatgaccacattcggtgtaggagagctaagcgcagttaacggtatcgctggctcttacgcagaacacgtgccggtagttaaagtcacgggcgcgccaaccactaaagtgatgaaggaaggagcgtacgttcatcacactctgggtgacggtaactttcaccggttctccaccatgttccgtgaagtgacctgcgcccagactatactcacggtcgagaacgcttcacaggaaatcgatcgtgtgctgctggcatgcctgaccgagaaaaaacctgttcacattgttctgccgatcgacgtatataataagccggctaacaaaccgaaaaagcaactgttagatgaagaaatgaaatctaacgaaaaagccatggatgaaatgcttacaaacttactgatgaaaattaataaggccaaaaaacctgtgatccttgcggactatgaagtataccgctacaaggctgaaaaagagctgatgcattttgcagagaaaagcggcttcccgctggctactctgagtatgggtaaaggcgttttcgatgagacccatccgcagtttatcggtgtttacaacggcgacttgtcggattcttacatcaaacagcgtatcgacgaatcagactgtattatttccgtgggcgttaagctgaccgacagcataactggtggcttcagccagggattctctgaagaaaacgtcatccacctgcatcccctgagcgttgaaggtgaaggggaaaaatatgcaccactgactatgaaagacaccctgaacactttggctcaccacgtcaagaaacgcgagcgtgaagaaatggatatcatctccactacgtctcgtcaacagcagccatttgaagctaccgatgaaaagctgacacagacccgatttttcgagcgtctgtcgtatttcattaaagaagatgatgtgctgctggccgaccagggtacttcctttttcggcgcggcaaccatgccgctgaaaaaaggtgggacttttatcggccaaccgctgtggggcagtatcggttacacactgccggcggtgctcggttctcagctagcagacaaggaacgcaggaatattctgctcatcggcgatggctcctttcagctgactgctcaagagctgagcaccattatctaccagaaaatcaaacctattattttcctgattaacaacgacggttacactgtagagcgcgctatccacggcgaaaacaagagctataatgatatcgttatgtgggattacgaaaaactgccatctatcttcgggccgaaagaagcttcggaaacgttcaaggtacagaccgaacaagagctggatgacatgctgaacaaaattgaacaccatgataaactggttttcgcggaaatcaaaatgaaccgtgatgacaagccggaattactgacggagttatcgaagagattctcttcacagaactcc

SEQ ID NO: 486 - DNA, 1680 bp, Artificial Sequence
  Synthetic polynucleotide
atgaacgggacggagcattgtgcgtacactgtaggtgactatctgttggatcgtctgacagaacttggcgttagtgaaattttcggcgtcccgggtgattacaatttagaatttctggaccacatcgtggcacaccccggtctgagatgggttggcaacgccaacgaactgaatgctggttatgctgcggacggctacggccgtctgcgcggtatgtctgctgtagttaccaccttcggtgtgggcgagctctccgcagctaacgccatcgcaggaagctacgcggaacatgtcccagtggttcacattgtaggcggtccgtcaaaggatgcacagggaactcgccgtgctctgcatcactcgctcggtgacggcgattttgaacacttcctgcgcatcagccgggagataacttgcgctcaaaccaccctgatgcctgctactgcgacgcgtgaaatcgatcgtgttctgtccgaggttcgcgaacagaaacagccgggctatatcctgatggcgaccgacgtggcacgtttcccggctgaacctccggaagccccgctcccacgttacactggtggcacctctccccgcgcgttgagcctgtttattgacgccgctactaaactgatcggtgatcaccaggttacggtcttagctgactacctggtacaccgtttagatgcaatcccgcaactggaggcgcttctgtctgctgatgcggttccgcatgcgaccctgatgtggggtaaatctctggtagatgaaagtaacccgaacttcctgggcatttatgttggagctgctagcgcagaaccggttaggcgcgccgtggaagaagctcctgtcctggtaactgcgggggtggtgtttacggacatggtttctagcttcttctcccagcgtatcgacccagcacgtaccattgatgtaggagttgatcagtctacggttgctggtcaggtcttcgccccgctagagatgggcactgctttggaagccctggccaccatcattgcggaacgcggtatcacatcgccgcccgttaccccggcttctgggggtgctccactgcaatcccctcctcgagaccagccgctgactcaaaaaatcttatgggaccgtctggcagcagctctgactccgggcaacgtcgtggtcgcggatcagggtaccagtttctacggcatggcatgccaccgtctgccgcgtggtgtaacctttataggccagccgctgtggggcagcatcggctacacactgccagccgccctgggtgcggggctggcacacagggatcgtcgcccggtactacttatcggtgatggcgcggctcaacttactgcccaggacctcggtgtgttctcccgcgaaggtctggctcccgttattgttctggtaaataacgacggctacaccatcgagcgagctattcatgggaagaacgcctcctataatgacatcgttagctggcgttgggctgaagttccgagggctctgggtgttaccaacgcgttgactttccgcgcacagacttgcggcgaactggacgatgctttcactgcggctgcgcgccatcaggatcgtatggtatttatcgaggccgtcgttccgcggctggatgtgccggacctgttagcagaactggcacgcccaacctcacctgacgggtctgcacgtcgg

SEQ ID NO: 487 - DNA, 1641 bp, Artificial Sequence
  Synthetic polynucleotide
atgacagtgagcatcggtcaatacctcttggaccgcctgaaagattatggcgtcgggcacatatttggcgttccgggtgactacaaccttggattcttagatatgattgaggacgatcctaatctggaatggatcggcaactgcaacgaactgaatgctagttatgccgcagacggttacgcgcgtattaagcccatgggtgctctgctaactaccttcggcgtaggtgaactgtccgcaatcaacggcgttgctggttcatttgcggagtctgtgccggttgtaaaaatcgtcggaatgccgtctcgtaacgttagcgaaaacaggcgcttcgtacatcacaccttaggcgatggtgaatttatgcgtttctacgccatgtatcagggcatctcggcggctcagactatcctgaacaaacagaatgctaaatccgagattgaccgagttctggcagaatgtgcgctgcataaaaaaccagtatacattggtatcccggcggacgtaccgcacatgcagattgaagttagctctccaatgctgtacaagccgaaatctgataagaaaatcctgaacgctttcatcgaggctgttaaaaaaacgctcaaaacctataagtcctttatagcaatggcggattacgaagtgaaccgctaccaccttaatcaagaactgcatgatttcatcgaggctactaacctgcctatcgccagtctgagcatgggcaaaggtgttttctctgaacagcacccgaactttattggtgtgtacaacggcattttgtcggacgatcgtgtaaccaacgctatcaaggaaagcgactgcactatcctagtgggcgttaaactgacggactccctgaccgccggcttccactacatctgcgaagagccgactccaaaaattgaagttcatccgctgtattctaaaattggggaaaaagtttattccgacatcctgatgcaggatgtactgaaaaaactctcccacctgaactttaaaagcaaaatgccttctaaggagccgaaagaaaagccgaaattaacgggtaaactgacccaacgtcagttcttccaggtggtggaaaaacatctgcaacccaacggtgtcctgatcgcagaacaggggacttcatttttcggcgcaatcgatgttagcctgccgcagggtaccagcttcatcggtcagccgttgtggggctccattgggtacacattcggcgcgctgctgggtagtgcactggcggaccgcaagcgtcgtaacgtgctgctggtaggggatggctcttttcagctgactgctcaagaactgagcactatgttgcgcgaaaatattacccccatcgtgcttgtcatcaataacgatggttacactgttgagcgctgtatacacggcccggaacgtaagtacaacgacatcaacatgtggcattataccaaactgctcgaagcgtttgatgtacacctgcatcgtaagcctctgtctttcaaagctggaactgtagagagcctggaacaagcactggaacaggcaaacaaacaccctgacaaattagctttcatcgaagttcagatggaccgtgacgatgcccctgcactgctgaaaaaactgggaggtttattcagcgcacagaatagttac

SEQ ID NO: 488 - DNA, 1686 bp, Artificial Sequence; identical to SEQ ID NO: 13
  Synthetic polynucleotide

SEQ ID NO: 489 - DNA, 1653 bp, Artificial Sequence; identical to SEQ ID NO: 17
  Synthetic polynucleotide

SEQ ID NO: 490 - DNA, 1698 bp, Artificial Sequence; identical to SEQ ID NO: 15
  Synthetic polynucleotide

SEQ ID NO: 491 - DNA, 1641 bp, Artificial Sequence
  Synthetic polynucleotide
atgaagaaacgggtaggtcaattcctctttgacgaaatcgctaaacatggcgtcgataaaatattcggggttccgggcgactttaacttggcgttccttgatgacattgagagtcacgaaaccttacagtgggttggtaatacaaacgaactgaacgcctcatatgctgcggatggttacgcacgtatcaacggcctggctgcaatggtgactaccttcggcgtaggtgaactgtccgccactaatggaattgctggtagctacgcagagaacgtgccagttatcgcgatcacgggcggcccgactaccgtagttgaaaaagcaaagaaatatgtccaccattctttgggaaccggtatttttgacgcttaccgcaaaatgttcgcacacatcacggaagcgcagacttacctgaccactgataacgctctcactgaggtgcctaggatcattcaggttgccatcgaagaaaaacgtcccgtgcatgttcacctgccgatcgacaccgctatgaaggaaatcgaagtgccggaccaaattgaatatccggaggtcaaagcttcggaggatctgtcttccatcatcgaaaaggttactgaagcactgcaaaacgctaaacagcctacgctgattgtgggtcaccagataaacagcttcgggctccaggcgcaggtacagcagctggcggagcgtctgaatctgccggtggctcagctgagccttggtaaaggcgctttcaacgaggaatctccacagtacatgggtatcttcgatggctctattgcagatgaagcgatccgtgactatgtcaacggctccgacgttgttatcaccctgggtgctaaactgacggactcggcgaccgctggttttagccaggaatttaaagacgatattgtaaaaatcctgaatcatcgccaggttcgtattggtgagtttgaatctacatccccggccctaccggaaatcgtagaagctttgggccaaatcgattaccactacgagggtcaattcccacagttcgtctggcctcaggcagaaaacgtggatttaaacgaagaaccgctcactcaggagaactacttcaaattaatgcagggtttcctgaaaaagggcgacgttgtcctagcggaacagggcacaagcttctttggctcttacagtctgggcatcgagggatcaaccactttcatcggtcaaccgctgtgggggagcatcgggtacaccctgccatcgacgctgggcaccactctggccgccccggaaagacgcaacatactgcttattggtgatggctccctgcaattaaccgtgcaggaaatttctactatgattcgtgaaaaaatgaatccgatcatttttgttatcaacaatgatggatatactgtagaacgcaagatccatggtgagaaagcccactacaacgatatccagatgtgggactataaaatgctgcccgcggttttcggtggccaggatatccctacctacgacgtgaaaagtacaaaggccctgaaagagacgatggacgcaatcgaacagaacccgaacactatgcacttcgttgaggtgcatatggatgtaatggacgctccggaaaaactgaatatcatcagcaaagcattcgcgaaccaaaacaaa

SEQ ID NO: 492 - DNA, 1656 bp, Artificial Sequence
  Synthetic polynucleotide
atggacaacatctacactgttggggattatctgttggaccgtctgtcattctccggcattagcgaactatttggtgtacccggcgattacaatctgaaattcctcgatagtgtgatctctcatcaacagataacctggatcggttgcaccaacgagcttaacgctgcctacggtgcagacggctatgcgcgcacaaagggcattgctgcactgttaactacgtttggtgtcggagaactgagcgctctgaacggtatcgccggctcttacgcggaatacgttccggtgattcacatcgtaggcgcgccaccgctgtccgctcagagaaaaggagagctgctgcaccatactctgggtgacggtgatttctcgcacttcatgcgtatgagccagccggtttccgtggcacaggcttctcttacacctgaaaatgccttggctgaaatcgaccgtgtaatcgaagatgttatttattcgtctcgcccgggttacctactgctgccgagcgacgtagcggctctgccggttagtactagggcacacgctatccctgcccgtcaaccagctttttccgcatcttcgctggaagcgttcgttgcggctgctgatgcacgccttcgtagcgcaggccgcgttagcctgttggcggactttctggcggagcgtttcggggtcaaagccgcactggaacagtggatggaggaagtgccgctggctcactctaccctcctgatgggcaaaggtttgttcaacgagcagcaaccgaactttgccggtacctactcaggcgctgcttccgctgcctcaaccaaagaagctatcgaaggtgcagatgttgtcatttctataggcgttaagttcacggacactatcaccgccggctttacgcagcagctgcctgcggagaaatgtatcgatctgcaaccgttctctgctcgtgttgggaatcagattttccatcagctcccactggaaaaaaccgtctctgtactgcatcgcctgactgccgaacgggctgatcagtggccgccgtatgctgttaagcgtactactctgccccagccggcggatgactccttagaccagtacgcgttctggcaacagatccaggcattcctccagccaggtgatgtgctcgtggcagaacaagggaccgcgtgctttggtgcggcagcactgaacctgccgcaggactgtcagttcgttgttcagccactttggggcagcatcggcttcaccctgccggcggcattcggagtacagattgctgctccggaccgccgtgtggtgttgctaatcggtgatggctccgcccaattaaccctgcaaggtcttggcgccgcaattcgttatggtctgcctccggtaatttttgttatcaacaaccaggggtacactgtagaacgcgcgatccacggcgagacccagcgttacaacgatatcgctcagtggaactggactcagtttcctgcggctttcggtggtaaggaagtattttcggcacgtgcggatagcccgcaggctctgaaagaggcgattgaacaggcatctgcaaaacgccgcatggcttggatcgaagtgatattaccgaaaatggacatccctgcactgctggactccgtaacgcgttctctggcgaaacgtaatagcggcgaa

SEQ ID NO: 493 - DNA, 1656 bp, Artificial Sequence
  Synthetic polynucleotide
atgacaagccactacactgttgcggactatctgttggatcgtctggccgagattgggatcaggcatctatttggcgtacccggtgacttcaacctgcacttcctcgatcacgtgatctctcatcctgtcataaaatgggttggttgcgctaatgaacttaacgctgcatacgcagctgatggctatgcgcgcgtaatgccagctgccgcattactgacgacctccggagttggtgaactgagtgccattaacggcatcgcgggctcattcaccgaatacctgccggtgatccacatcgtcggtactccgaccctgcggagccagaagaacggtgaactgttacaccattctctgggcgacggcaatttttcccacttctcgcacatggcaaaagaggttacttgtgcgcaagctaacctgactgctgataacgcggcttacgaaattgaccgcgtactgggcgctgcactctctcagcgtcgtccggtttatctgagcctgccgtcggacgtggcgcagacggatatcgctatctaccaaggtaccctggctttgccgcagccagtcctgtctccgaccgctctgcaagcctttattaatgctgcgcgtgagaaattacagtccgcccatcgcgttgcactgctggcggacttcttggctgatcgtttcgatatgcagctgagcttgaaccgctggctggcggaagtaaacctgcctcattctactcttctgcttggtaaaggtgtactggacgaaactcacccgctgtttattggtacctatgccggcgcagctagcgaaccgcacgttaaggaatgcatcgaaaacgcggacgtcctgatcacggtgggcgtgtgcttcgccgatataatcaccgcaggtttcagtcagaacatcaatcaggataactgcatctctattcagcctgagcaagctcgtatcggccgcacttgttttagccagattccaatgcgtgctgccatcgaagcgctccatgagttatgtaaaaccctgcaagatgaatggcagcagcccgtgattactcgcccggaacgtgctgaaccgaaatccgacgttctggatcagcaggctttctggtaccacatccagcaattccttaggccgaacgacctggttctgaccgatttagggacaagttgctttggagcaggcacactcaacctgccctctggttgcacttacatgtcccaggcgctgtgggagtcaatcggattcagcctgccggccgcctatggcgcgcagctggcacagcctcaacgtcgtctgatcctcctggttggtgacggggctgctcagctgaccatccaggaactgggtagcatgctgcgcgatggcttaaatccgattattttcctgttgaacaaccagggctacactgtagagcgtgccatccacgggccacaacagcgctataacgacattgcgacttggaactggacccagctgccgctagcattgggtctgggtaaggaatccttcacgcaccgtgttaccaaagttcagcagctgcaacaggttctggcacaaattgaaaaaccgcagaagttaacatttatcgaagtagttctgccgccaatggatatcccggaattactgatgcacgtcactaaatctatccagcggcgtaatgtagct

SEQ ID NO: 494 - DNA, 1644 bp, Artificial Sequence
  Synthetic polynucleotide
atgacaaagacggtagttcaacacgtgttgagtcgcctgtatgacctcggcattagcgatatatttggggttccgggtgacttcgcattcccaatccaggatgccgtttgcgaggactctcgtttacgatggatcggtaactgtaatgaactgaacgctgcgtacgctgcggatggctacgctcgtatccgcggtatggcagctctgaacactacttttgccgtcggcgaactgtcagctctgaacggcgtagcgggtgcattcgctgaatccctgccggtgttccatcttgtcggcatgcctagctctaccgttcaggcgtccggagttattgtgcaccataccctgggtgacggtaacttcactgccttttacgaggctaccaaacacttcgtatgcgcacacgcaatcatgacccccgaaaactgcgttgccgaaactgaacgtctgattgcggctgccctgcggtatcgcaaaccggtatacatgggctttccgtctgattatgcggagatgccaatcatcgaaagcgatgtgccgcaggctacagctgctcagtcaaatcccgctgcactttcgctagccgttgaagcgattgcggaacgtatcaaccgttctcaaaaaacctgcatcttaccgggcattagcatcgctcgtcacaacctgcgccaggaagctctggagctggttaattccaccaacttgccgttcgcaactatgtttatggacaagtctgtcctcgatgaaagtcatccgaactacgtaggcatttacaatggtcacctgctgaacgacgacgtttcggagttcgtcgagggttgtgactgtatcctgaaaatcggtgccatgctgtccgatttcaacacgggcgcgttcactgctgatttcagccgcgcagataccctgaacatcgaacctgaatttgttcagataggtgaaacccgttacaataacgtcatgatgcgagatgtgctaacgtctctggttggtaaagtcgtgcgtcgtaccgaaactacatctatgcctcatgcgaccgccattcctctggtatccgaaacgggcaaaatcactgctgactatttatacagccgctggcaggaaatgctgaagccagacgacatcctggtagcagaaactggtacggtatcaatggggatgggatttgctttactgccgcagggcgcaaccttccacaaccaaactctgtggggttcgatcggttgggcgaccccggcagcgctgggcgcagcgatcgcagcgccggagaaacgtactgtcctggtaaccggggagggttcccaccagctaaccgctcaggaaattagtcagtttcatcgctatggcctgaaaccaactatcatcgttctgaacaatgatggttatctgattgaaaggctgttgtgcaaagacagcgatatttactacaacgacctggcgcagtggaaatattctaaactgccggaagcaatgggctgcgaaggctggttcagcattcgtgttactacctgtgaggaactgaacgacgctatcgaatacgccgaaacctgcgattgcggagtttacatcgaagttgtgacggaaaagtacgttacatctgctttggccgctaaactgcacgattctatcgacactttatacagcatg

SEQ ID NO: 495 - DNA, 1689 bp, Artificial Sequence
  Synthetic polynucleotide
atgctcgtgacggacgctgccagccagcctgtatatacagttggggattacttgctggacaggcttgcggaactgggcgtcaccgagattttcggtgttccgggtgattacaacctggaatttttagaccacatcgtagcacatccgtctatccgatgggtgggctccagtaatgaactgaacgctggctatgcagctgatggttacggtcgcctgcgtggcatgtctgcggttgtcactaccttcggtgttggcgagctatcagctgcaaacgcaatagcggggagctacgccgaacaagtaccagttgtgcacattgtgggcggaccctcgaaggacgctcagggtactcgccgtgcgctgcatcactccctgggtgatggcgactttgaacacttcttccggatcagccgtgaaatcacctgcgctcaggccaatttgatgccggcgactgcgcgccgtgagatcgatcgcgtcctgtctgaagttcgtgaacagaaacgtccgggttacattctgctgagcaccgacgttgcacgtttccctactgaaccgccgggcgatccactcccgcgttataccggtggtacatcccccagagctttatctctgtttgttgaagctgccagcgccttaatcggcgatcaccaacttactgtgctggctgacctgctcgttcatcgcctgcaagtagtaaaagaactggaggctctgctgactgctgatgttgtcccatacgctacgctgatgtggggaaaatcattgctggacgagtcttctcctcactatctgggcatctacgcgggtagtgcatccgcaccggctgtccgtgccgcgattgaacaggcgccggtgctggtgaccgctggcgttgtgttcaccgacatggtaagcggctttttctcccagcgtattgacccggctcgcaccattgacgttggtcagtaccagagttctgttgccggggaagtatttgctccactggaaatgggtgcagccctagaggctctggctactatcctgacccgtcgtccggtatcttctccggcagttgcaagcccaccggctgaagcgctgccgccgcccccgcctcgcgatcagccgctgactcaggaaatgctttgggataggctgtgtactgcgctgacgcctggtaacgtggtactggcagatcagggcacctcgttctatgggatggctgaccatcgtctgccgcagggagtaacgttcatcggccagccgctgtggggttcaatcggctatacactgccggcagcgctgggtgctggcgttgcacaccccgatcgtcgtaccgtgttattaatcggtgacggcgctgcccaactgaccgttcaggaattaggtaacttttcccgtgaagggctgtccccggttatcgtggtcgttaacaacgatggctacacggtggaacgcgccattcatggtgaaactgcgccttacaacgatatcgttaattggcgctggactgaaatcccaggggctctgggtgtagccgatcatctggcgttccgcgtacgtacttacggtgagctggatgacgcactgaccgcggcggctcagcacagcgatcgcatggtcctagtcgaggttgtgctgccgcgtctggagataccgcctctcctggtagaactggtccaaccgatgtcgccggacggctccgtacggcgg

SEQ ID NO: 496 - DNA, 1644 bp, Artificial Sequence
  Synthetic polynucleotide
atgtacacggtggcagattatctgcttgaccgcctcaaggaactgggcatcgacgagattttcggtgtacctggggattacaacctgcaatttctggatcacgttactgcgcgagaagacttagaatggatcggtaatgccaacgagttaaacgctgcttatatggctgacggctacgcacgtaccaaaggtatttccgcgttcgtcactacctttggcgttggcgaactgagtgccgttaacggtctagctggtagcttcgcagaaaatgtaccagtgatcgagatagtcggatcaccgacaaccgcggtacaggcttcgaaaaaattggtacatcacactctgggcgatggcgatttcctgcgttttgaaaagatgcatgaagaagttaccgcaggcatcgcgcacctgactgctaacaacgcactgaccgaaattgaccgtgttctgctcatcgcgatcacagagaaacggccggtctacattaatctgcccatcgacatcgctaccatcactgtttctaaaccgcagtctaaacttaactcccaggctgaacagctgacggctgtagaggccgcaattctgactaaagtggaacaggccttacaacaggcccaatgtccggttgtgatcgctgggcacgaaatactgtcttatcacatcgagcagcagcttgatgccttcattcagaaattcaacctgcctatcaccactctgccgctgggtaagagcgcatttaacgaagatgacgctcattacctcggtacgtataccggtagcacaactgacgaaccactgaaatcccgcgtagatacggctgacctggttctgctgttgggcgttaaactgaccgattcggcgaccagcggtttctcttttggcttcacggaccagcaggttatcagcattggctctactgaggtattattctacggtgaacagcaagagaaagttcaactggatcgctttgtgtccgcgctggcaactttgtctttctcccgtttcaccggtgaaatcattccggttaagaggaccgaaaatttagtgatcactgatgagaaccttacccagaaacagttttggaagatggtagaagaatttctgatctctggcgacactatcattggcgaacagggtacgtcgttcttcgggctgaccaacgtccctctgaaaaaggcagtaaacttcatcggacaaccgctgtggggtagcatcggttacacattcccgagtgcgctgggctcacagctggcgaacaaagcttcccgtcatctgctgttcatcggagacggttcactgcaactgactgtccaggaactggggactgctattcgtgaaaaattggctccgatcgtgtttgttatcaataacaacggttacactgttgagcgcgaaatacacggcgcgaccgaacagtacaacgatattccgatgtgggattatcagaaactgccctttgtgtttggcggaactgaacagaccgtggctacctataaagtattcacggaactggagctggacgaagttatgaagactgcacgcaacgataccgaacgtatgcaatggatcgaggtcgtgatggatcaggaagacgctccagaactactgaaaaaactcggcaagattttcgcgaagcagaacgct

SEQ ID NO: 497 - DNA, 1653 bp, Artificial Sequence
  Synthetic polynucleotide
atgtcgaacacggtaattaaatacctcttgaatagcttatatgatctgggtatccacgacatcttcggcgtggcaggggactacgcttttccaattgaggatactgtctgcaactctgaacgtatgcgctggatcggcaactgtaatgaactgaacgcggcttatgcagccgatggttacgctcgggttaagggtgttgccgcgctttccaccactttcggcgttggcgaactgtctgcgatcaacggtattgctggtgcttacgcagagaacctgcctatattccatctggtggggatgccggccagcggcgtacagaacagtaaaagactggtacaccataccttaggcaatggagactttgatgttttctatgaactgggtcaacgtctggcgtgcgcacacacaatcctgactccggacaactgtatcgaagaaactgctcgccttataaacaccgcactgaaagagcgccgtccggtttatatcggtattccctccgactacgcgctgatgccgatcaactcacctcagaatacgtctgtggtttcaccggtcagctctgttagcaacaaagaaaaccttgaaaaggctatctccactattatcaaaaaaattacccacagcgaaaaaatctgcgtcctgccgggtatcctgtcgtctcgtttcggcgttgatgagaaggtgcagaccctgatagataaaaccggcctaccgtttgctaccatgtttatggacaaatctgtactctcggaatcccatccacaatacgttggaatgtacgacggtcagctgatgactccgcaggtcaggaatttcgtggaaaacagtgaatatattatcggcatcggtgcgatcctgagcgatttcaacactggttgcttcacggcaaaaattaacccggagcagtttatcaacatcatgccagactacgttgaaattggggatgaaaaattcacctccgtccacatggacgatgtaatcactcgtctgattgaggccctgtcttataagatttactctatcccgaaggctcaatctctgaacaataacacgcagtttcaccatgaaaaaattactgcggaatacttatacccgaaactggaagctttcttcaaacctaacgatataatcttctcagagaccggcacctgttctatgggcctgggttttgcactgctgccggaaaacgcgaaaattcacaaccagacgctgtgggggagcatcggctgggccacaccagctagcttcggtgccgccatcgccgcgccggaatcgcgaattatcctcgttaccggcgaaggttcccatcagctgactgttcaagagatctcgcagtttatccgcttcggtctaaaacctatcattttggtgttaaataacgacggttacttaatcgagcgcctgctgtgcgactatcccgacgcgtattacaatgatcttgctcagtggaactatcaccagttgccgcaagctttcggcgcaactgattggtactgccagaaggtgaccagcactaatgagctggatgaagctctgaaaatcgcttccagtaacacttcagcgtgttacatcgaaatcgttaccgataaatatgaaagctctgaactagcacagaaattaaacgagttcaaatctgcactgtactccttc

SEQ ID NO: 498 - DNA, 1644 bp, Artificial Sequence
  Synthetic polynucleotide
atgatgaagaaacgcattggtcagttcttgatcgatgagatcgcgaaacaaggcgtggacaaaatttttggagtaccaggtgacttcaatctgacatttctggatgatatagaagcccatgaaactctcgaatgggttggcaacacgaacgagctgaacgcatcttatgctgctgacggttacgcacgactgaacggccttgctgcgatggtcactaccttcggggttggcgaactgtccgcggtcaatggtatcgccggttcgtacgctgaaaacgtgcctgtaatccagatcaccggggcaccgactaccgttgttgagcaggcaggcaagtacgtgcaccacagcttaggtaatggaaaattcgatgactatcagaaaatgtacgctcaaattaccgaaacgcagacagttctgactgtggacaacgctctgactgaaattccgcggatcatcaaagtagcaaccgaagagaagcgtccggttcatgtacacctgcccatcgatatcgcggcgaaagaaatcgaagtaccagacgatgtggcttatcctgctacccagaaagctgaaaacgtttcaactgttgttgagaagcttacagaacgtctgaaagccgctcaacaggtcaccctgattgtgggccatcagattaactcttacggcctgcaaaaagatgtccaggcaatcgctgaaaaactgaacctaccggttgcccagctcagtctgggcaaaggttcctttaatgaggaaagcgcacagtacatgggtgtatatgacggctacatcgccgaagacaacattcgcgattatgtggatggcagcgatctggtaattactcttggtgcgaaacttaccgactcagcgactgcgggtttctctcagaagttctccaacgatacgatcgttaccctgaaccaccgtgacgtgaaggttggtgactacacgactactgaaccgtctctgccggaaatcgtggaggcatttaaaaatattgatttcaaatacggtggcgactttccgcaataccagtggccggatgttagcgcagctgtttacaacgatgaaccactgacccaggaaaactacttcaacctaatgcaaaacttcttacgtaaaggtgacgtcatcctgggcgaacagggcacctccttctttggagcttatcgtctggcgctgcaagagggaaccacatttatcggccagcctctgtggggtagcataggttacactctgccgtctaccctgggaaccctgctggccgctccggaacgcaggcacgtactgctgattggcgacggttcactccagcttactgctcaggagatgtctactatggtccgccagaatctgaacccggttatcttcattatcaacaatgacggttatacggtagaaaagaaaatccacggcgaaaacgcgaaatacaacgacatacagatgtgggattataaattgttgccggctttgttcggtaacaaagatatacccacctatgatgtaaaaacgtctaacgacctgaaagttgctatggaccaaatcgaccagaatccggataccatgcatgttgtagaggttcacatggatgtgcttgacgccccagctaacctgaacgaaatcagtaaggcatttgcagcgcagaacaaa

SEQ ID NO: 499 - DNA, 1656 bp, Artificial Sequence
  Synthetic polynucleotide
atgtcgtactgcgtagctgattatctcttggaccgcctgactgaggcaggcattcggcacctgtttggggttccgggtgactacaaccttcagttcttagataatgttatagaaaaccctaccctagcgtgggtcggttgtgccaacgaactgaacgctgcatatgctgcggatggctacgcccgttgccatggtgctgctgccctgctgacaacgttcggcgtgggagaactgtccgcaatcaatggtatcgcgggcagtttcgcagagtacgtaccagtgatccacattgttggcgctccctgcatcggtgcgcaaaggcgcggcgaactgatgcatcacaccctgggtgacggcgactttggtcatttcgcacgtatggcacaggaagtcaccgttgtacaggcgagcctgactgctgaaaacgcttgttacgaaatcgatcgtgtgctgattcaggtcctttctcaacgtctgccgggctatctgctgctgccgtcagatgttagccaggcaccagcgactcgcccgaccaaatctctcctttccccgcctgtctctactgacccgactctgctgaccgagtttcgtgcttgcgcccaggctcgcctagcggaatctcgttcagtggctttactggcggacttcctggcgatgcgtttcggtcagcaaaagacactgcaacagtggatggatgacactccgatgccgcacgctacccttttgatgggtaaaggcctgtttgacgaaggacagcaggggttcgttggtacttactccgccgcagcaagcgatgctagcgtaatccaggcaattgaaaaagctgagctggttatctgcgtgggggttaagttcaccgatactctgacggcaggctttacccagcacttctcgctccagcaaactatcgacattcagccaaacgcgactcgtatcggtgaacgctggttttctggaatcgtaatggaagaagctgttagcgtcctgcatcagctgtgtaaacgtcaggtgagtggttggcctgtaccgaaacaaaagccgcctgccctgccggaggctaccaacggggaactggatcagcatgccttctggcagctgatgcagaaattccttcaggctggggacatcattctggccgaccaaggtactgcggcgttcggcgcagcaacactgaccttgccggcgggtgttacctttattacgcagccactgtggggctccatcggcttcacgctgccggctgccttcggtgctcagacggcatgcccgaaccgtcgcgtagttctgctggttggcgatggttctgcgcaattaaccatccaggagattggctccatgctgcgtgatgaacaacgccctatcatctttttgctgaataacgacggttatacggtagaacgggccattcacggcgcggagcagcgctacaacgatatcgctccatggaattggacccagatcccaaaagcgctcaacattcacaaccaggcgcaatgctggcgagtcactgaacaggtgcagctggaggaagttatgcagaaagtagctaaagctgagcgtctgacattagtggaagtcgttctgcctaaacaggacatcccggaactgctgcaagcagtgacagcttctctggcaaagcgtaacgccgctaaagat

SEQ ID NO: 500 - DNA, 1695 bp, Artificial Sequence
  Synthetic polynucleotide
atgacaagcatgaacaataacagtaagcaaacgcccatcgaacagaaatccgtcggggagtacttgttcgattgcctcaaacaggaaggtataaccgaaatctttggtgtgccgggcgactataacttcaccttactggacactctgcaacagtacgatggcattcagttttataatggtcgtaacgagctgaacgccggctacgctgcggacggttacgcacgcattaacggcatgtctgctctgatcactactttcggcgtaggtgaactgtcggcatgtaacgcgatcgctggcgcaaactctgaacatgttcctatcatccacattgttggagctccaccagagaaatcccagaaagatcagaaacttatgcaccataccctgatggacggtaacttcgatgttttccggaaggtatatgaaccgattaccgcgtacacggcagtggtcactccgaacaacgctcgtatggaaatcaccgccgctatccgcgttgcgaaagaaaaaaagaaaccggtttacctcgtgattgccgatgacgtagttgccaaaccggtgtcagtcctggatgaactggagtctccgctgactaccagcaatcaagacaagctgcaagaagcggctgatcacgttcgtcgtctgctggagccagcgggtcgtcctgtaatcttggttgacgtgaaaactgtacgctttggcctggaaaccgctgtgcgtgaattggctaatgcaatgaacgttccggtcgcaactatgatgtacggaaaaggtgcttttgacgaatcgaacccgaattacattggcatgtatgcaggaaccttcggtagtagcgaagttcagagcatcgtggaaagctctgattgcgttatagcgatcggccctgtatgggccgacacaaacacggcttctttcacggctaaactgaacccgcataatactatcgaaatccagccggatatggtcaaaattggtgtttccgaatatcccgacgttcaggcggctgatatgctacaggaggtacagcaaatcggctatcgtagcaaagctaagccggaaaaagtttctttcccgtacgaggaaatcactggctcaactgacgatcccctgaaagcagcctcctacttcccgcgctttcagcagatgctcaaagaagacgacatcgtaattgcggagaccggtattttctactatggtatgtcgcaggtgaggctgccgcgcaacaccacctacatctcccagggtgggtggcagtctatcgggtatgctacccctgctgcatacggtgcttctattgcagcgccagaacgtcgagtgcttctgtttactggcgatggtagcttacaactgaccgctcaggaaatcagctcgatgctgtactacggctgcaagccgatgatttttgttctaaacaacgatggctatactatcgaaaaatatctgaacgttaaaactgaaccggatgagcaacagtacaacaacattcctgcgtggtcctacacaaaactggcagaagccttcggtggtaacctgtttacgaagactgtacgtaccaatggcgaactggagcaggccatcacagaggccgaacaggagtgcgacgaaaaactgtgtctgatagaaatgatcgctgcggatccgatggacgcgcctgagtatatgcaccagatgcgcaaattcaaacaacagcagatg

SEQ ID NO: 501 - DNA, 1638 bp, Artificial Sequence
  Synthetic polynucleotide
atgaagcagcggatcggtgcttacctcattgacgcaatccatagggccggcgtcgataaaatatttggggttccgggcgacttcaacttggcgttccttgatgacattatcagtaatcctaacgtagattgggttggtaacaccaacgaactgaacgcttcatatgctgcggatggttacgcacgtctgaatggcttagccgctctggtgacaacttttggtgtaggcgagctgtccgctgtgaacggtatcgcgggatcttatgccgaacgtatcccggttatcgcaattacgggcgcgccaacccgcgcagtcgaacaagctgggaaatacgtgcaccacagcctgggtgagggtaccttcgacgattaccgcaaaatgttcgcccatattactgttgcacagggctacatcactcccgaaaacgctaccactgaaattccacgtctgatcaacacggctatcgcggaacgccgtccggttcacttacacctgccgattgacgtagcgatatcggaaatcgagatcccgactccgtttgaggttaccgctgctaaagataccgacgctagcacctatatcgaactactggcgtctaagctgtatcagtccaaacaacctatcattatcactggtcacgaaattaactctttccatctgcaccaggaactggaagatttcgtaaatcagactcagatcccggttgcacagctctcgctgggcaaaggcgcgtttaatgaagaaaacccgtactacatgggtatttacgacggcaaaatcgcagaggacaaaattcgtgattatgtggacaacagcgatctgatccttaacatcggtgctaaactaacggactctgcaacagcggggttcagctaccaattcaatatagacgatgtcgttatgctgaaccatcacaacatcaagattgacgacgttaccaacgatgagatttctttgccatccctgctgcaacagctgaccgatatctcttatactaacaacgcatcatttccggcttaccatcgtccgacatcccctgattacaccgttggtacggaattgctgactcagcagacttatttcaagatgatgcagaactttctgaaacctaacgacgtaatcatcgccgatcagggcacgagcttctttggagcttacgatctggctctgtacaaaaacaataccttcatcggccaaccgctgtggggttcgatcggttacaccctgccggcgaccctgggcagtcagctggcagacaaagaccgccgtaatctactgctgatcggagacggttcccttcagctgactgtacaggctattagtacgatgattcgccagcacatcaaacccgtgctgttcgttatcaacaatgatggttatactgttgaaagactgattcacggtatgtacgaaccgtacaacgatatccacatgtgggattataaagccttaccagctgtcttcggcggcaagaacgtggaaattcacgatgtagaatctagcaaagacttgcaggacacattcaacgctatcaactcccatccggacgtcatgcattttgtagaagttaaaatgtctgtggaggatgcgccaaagaaactgattgacatcgccaaagccttcagccagcaaaacaag

SEQ ID NO: 502 - DNA, 1647 bp, Artificial Sequence
  Synthetic polynucleotide
atgacaaacacggtaattaaatacgtcttggaccgcctgtatgatctcggcatcaaggacatatttggggttgcaggtgattacgccttcccgatcgaagacactgtttgcaataaccaacagcagcgttggattggtaactgtaacgagctgaacgctgcgtatgctgcggatggctacgctcgtatcaaaggtatggcagctctttccaccactttcggcgtgggtgaactgtcggccatcaatgcaattgcaggcgcttacgctgaaaacctgccaatcttccacctagtaggcatgcccgcgtcaggagttcagaaaagtaagcgactggtgcatcacaccctgggtaacggtgactttgatgttttctaccagattgcccaacgcctggcgtgcgcgcacaccatcttaactcctgagaactgcgtcgaagaaatggaacgtgtgatcgacgttgctctgaaagagagacgcccggtatatattggcatcccgtctgattacgcaaacagccaggtagtggaaccgcttagcgttaccgctccgcagaaaccaacttctgataaagcgaccctggaaaaagctgtctccgctatcgttgaaaagctgacccattctaacaatgtgtgtgttctgccgggtttcctatctgcccggctgggactgacggacaaaattcagcactttattgacaagacgggtctgccctatgccacgatgttcatggacaaaagcatcctttccgagtctaacactcaatacgtaggtatgtatgatggccagctgatgactccggaagttcgtgaatttgtggaaagcagtgaatacatcttgggcatcggtacactgctcaccgacttcaacactgggtcatttaccgctaacataaaaagcgaacagttcatctccatcatgccggattatgtagagattgattccgttatatactcttgcgtctacatgactgatatcctgtcggagctgactcaacgtctccctaataaaacctatcacaaaatcactgcaaagggcctgggtgaagcggtaacctctgacaacaataaaatcactgcacagtacctgtacccgaggctggaacaattcttcaaaccaaacgatattatcatcgctgaaaccgggaccagctctatgggcctgggctttgctctgctgccggagggtgcgcagttccataatcagacgttgtggggcagtattggatgggcaacgccggcggcactgggtgcggcactggcggctccagaaaaacgtatcatactgatcacaggggaaggtagccatcagctaaccgtacaggaaattagccagtttgttcgtttcggcttaaaaccgatcatcttggtgctgaacaacgatggttacttaattgagcgcctcctgtgtgactacccagaagcatactataacgacctggcgcaatggaattaccaccagctgcctcaggcttttggcgctactgattggtactccgaaaaagttaccactgcgtctgagctggacaacgctttaaacaaggctgccctgaccgatagtgcttcatatattgaaatcgtgactgagcgctatgaggcttcggaactggctcagaagctgaaagaaagcaagtcctctctgtacagcttc

SEQ ID NO: 503 - DNA, 1695 bp, Artificial Sequence
  Synthetic polynucleotide
atgacagacgagcgcttggaaatcccatatacggtcgcggattacctcctggaccggctggcagaagccggtgtgcgtcatctgttcggcgtaccgggggattttactctggctttcttagatcacgttcagcgtcaccccctgatagaatgggttggttgcgctaatgagcttggcgctgcatacgcggccgacggttatggccgcatgcatggtttgggcgctctatcgaccacctttggagtcggtgaactgagcgctattggtgcgatcgcaggctcctacgcagaacacgtaccggttctgcacgtggttggcgcgcctactactgcaacccaagctgccggccgtgctactcaccataccctgggtgacggcgatttcggtcacttcgcaagaatgacggccgaggttaccgtagaccaggctcgtctgactgctgctggctactctgcggaaattgatcgcgtgatcgtggccgcacgtgatcgccgtctgccgggctatctgatcgttccggcggacgtaagtgaagcgcccgcggaaccgcctcgtcaggctctgccacaacacccggccattactgatccggacgttgtggatcgttttcgccaggctgttgcagccaggctggctgcggctcgtagcgtcgctgttctggcggacatcctggtttctcgcatgtcagctgaagactccctgcgtggtcttttgcgcctgggtgtaccgcatgctacccttctctgggggcgtcgggtagttgatgagtctgcggaagcatacttaggctcctatctgggagctgcgtcagacggtgctgtacagactgtcatcgaagacagtgatgtgctggtgatggttggggtccagttcaccgacctgacaagcggtttcttctcccagcgtattgactctgctcgcacgattgaaatccgtggggaatacgctaccgttggcggtgaacgtttcgagccgctcgctatgtctgccgcgttgcatgccgtcacgagcgcagttcgtgaggaagctgaacacctgcaactgatccctactggtgctgcacaccgcccggaagatcaaccacgggttgaggtagaagacgaaccgctgggccaggcggcactgtggagcgaagtgacccgttttctgcgcccgggcgatacagtgctggcggatcagggcacttctttttacggtatggcaggccaccgcctgccacatgatgtaaccttcgtgggtcagccgctgtgggcagcgatcggcttcacgttacctgcactcctgggtgctgccctcgctcgtccggatcgtcgtccggtcctgttgattggcgacggagctgcacagttaactattggtgagttaggtacactgctccgacatcgcatcccggccgtaatcgttatcgtcgacaacgctggttataccgttgaacgtgccatacacggtctggaagaggaatacaacgatatcgctcgctgggattggactgcgctggtgcgtgccatggacagcgaacagaccgcaaccggagttcgcgtagctactcacgagggcctgcgggatgcgctagacgctgcacgtggcagtgaatccctaacactgatccaagcagtggtgccacctctggacgttccgccggtcctgcgtgctctgggggcagcagctgcgaacgcgaaccgtccgctagaccgt

SEQ ID NO: 504 - DNA, 1647 bp, Artificial Sequence
  Synthetic polynucleotide
atgacaaagacggtagttgaacacgtgttgagtcgcctgcaagacctcggcattcggcatgtctttggggttgcaggtgatttcgccttcccgatcgaggacgctgtttgcgaatcacgtactatgcagtggatgggtaactgtaatgaactgaacgctgcgtatgctgcggatggctacgcacgtatcaaaggtgctgccgctttatccactacctttggcgtaggagagctatctgcgataaacggtattgcaggcagctacgccgaacacctgcccgtgttccatctggtcggcatgcctgcgtctggtgttcagaaaagcggccgtttggtacaccacacccttggtgacggaaacttctccctgttttgcgaactgggccagcgcctgtcttgcgctcacgcagttatgactccagaaaattgtgtggctgagaccgaacgcctgatcgcggcagctctgcgtgaacgacgtccggtctatatcggtctgccgttcgattacgcaacccaaccggttcagattccggaacatctgactgcccctgctcagccggtatcggataaaacagcgttgacggaagctgtcgcagccatccgtgcgaaactggccgacagcccatctgcgtgcattctgccgggcatgctggcggctcgttccggtctgatcgatgacgtgcaggctctgatccgccaaacgggtcttccgtacgctactatgtttatggacaaagcaatcattagcgagtctgatcctcactacgccggcatgtataacggtcagctgatgaacccgcagatcagagaatttgttgaaaattccgactgcgttctggggataggggctgtgatgaccgatttcaacaccggctcgttcaccgcggacatcgcaccagagaagttaatcagcattatggccgatcacgttcgtgttggtgctgcgacttggcagaacgtatacatgcgtgatctcctaccggccctgactgctgtgttgccccatcgcgagtgccacatccctgctgctaccggcctgggtaaacccgtagcggacgcgtccggcaatatcacaccacagtatctgtacccgcgcttcgaacaactgttccgtaaagacgatattatcattgctgagactggcaccgtaagcatgggtctgggtttcgcacttttaccggaaggtgcgcagttccacaaccagaccctgtggggatcaatcgggtgggccactccggctgcggttggcgcagctattgcagctccggatcgtcgcctgatcttaattaccggcgaaggttctcatcagctgactgcacaggaaatctctcaattcggtcgtttcggcctcaagcctctgatctttgttctgaacaacgacggctacctgattgaacgcctgctttgtaaagatccggaagctgtgtataacgatctgccgcagtggcgttatgcacaactgccccaggcactgggttgtgataactggtactgccggcgtgtgactaccagtactgaactggacgaagcgatccgtgaggctgagaccggcgatcgcgcagcctacatcgagataatcactgaaaggtacgccgcttcagacctggcaaagaaactaggcgaatcagtggccacactctacagcttc

SEQ ID NO: 505 - DNA, 1671 bp, Artificial Sequence
  Synthetic polynucleotide
atgacagacgatggctatactgtgggtgattaccttctggacaggctcgcagaactgggggtaaccgagattttcggcgttccaggtgattaccagttggaatttttagaccacatcgttgctcatccccgcatcacctggatcggaggtgcgaacgaactgaatgctggctatgccgctgacgcatacggccgtctgcgtggtatggcggccctggtcactacgttcggtgtaggcgaactgtccgctgcaaacgcgattgctggtagttacgcagagcacgtgccggttgtccatatagttggagctccgtcaaaagattcgcaagccgcgcggcgcatcgtacaccatactttaggcgacggtgattttgaacacttcctgcgtatgtctcgcgagatcacctgcgcgcaggctaacctggtgcctgctaccgctactcgtgaaattgatagagttctgagcgaagtacgcgagcagaagcgtccaggctatctgctgatcgcaacggacgttgcccgtttcccgaccgaaccgccgcacatgccgttgcctcgttacactgatggtacatctccgcgtgcccgcagcctgtttacagaagctgcggcccagctgattggggaacatcggctaactgttctggcggacgtactggttcatcgtatgggctgtgtcgaagagctgggtaaacttctcgcagcggataccgtgccgcacgctaccctgatgtggggtaaaactcttgtcgacgaatcctctccgaacttcctgggtatctacgctggcagcgcatctgagggttcggtgcgtgacgttatcgaaaatgctccggtccttgtgaccgcgggggttctgttcactgatatggtgagcggctttttctcccagcgcattgaccctgcgcgtactatcgacattggcgtaaaccagtctatggttgcaggtcaagtttttgctccgctggatatggctgctgccctggatgtcctgaccgccatcttaaccgaacgcgggatcgaatcccctgcgctgccccccccggccgctccggaacgtcacgctcctccggcaagggacgcagctctgacgcaacacgcactctgggatcgccttagcgaagcgctgaccccaggaaacgtggttctcgctgaccagggcaccagtttctacggcctggctggtcaccgtttagcatcgggtgtgaccttcataggccagccgctgtgggcgtccatcggatatactctgccggccgcggtgggcgcaggcctggctgatcgcgatcgtcgcactgtactcttaatcggggatggtgctgcacagctgactattcaggagctgggtgcattcggtcgtgaaggtctgactcctgtagttgttgtagttaacaacgacggctacacggtcgaacgtgcgatccatggcgttaccgctgaatataatgacattactggctggcgttggaccgagctgccggctgccctgggtgtgcccgacgcactgacctttcgttgccgaacttacggagaacttgacgatgccctgactgttgcagcggaaacgcaggatcgcatggtatttgtcgaagtaatgctggagcgtatggacatcccaccgctgctgtctgaactggcacagagcgcgtctgctgccaacgcagcgtccggc

SEQ ID NO: 506 - DNA, 1641 bp, Artificial Sequence
  Synthetic polynucleotide
atgaagaaacgggtaggtgaatacctcatggacgccctgtctacggtcggcgttgagaaagtgtttggggttccgggcgatttcaacttggcgttccttgacgatattgtgagccgcgatgacatggaatgggttggtaataccaacgaactgaacgcttcatatgctgcggacggttacgcacgtatgaacggcatctccgctatggtcactacctttggcgtaggtgaactgtcggcagttaatggaatcgctggtagttatgcagagcgtgtgccagttgtagccataactggcgcgccgacaactgtggttgaagaagcagggaaatacgtacaccattccttaggcgagggtaaattcgataactaccgcaagatgttcaaagaaatcaccaccgcgcaaggttatatcactgtcgaaaacgctcagactgaaattcctaggctgattaacgccgctatcgcggaaaaacgtcccgtccacctgcatctgccgatcgacgttgctcagagcgagatcgatgtggttgaggcttttaaaccggcagaagccgttaaacaggacgtatctaaatacattgagatgatcgaacaaaagctgaaaaccgctaagcagccggtaattatcaccggtcacgaaattaatagcttcaaactgcacgataaactagaacagtttgttcagcagacggaaatcccagttgcccagctgtctctgggaaaaggcgctttcaacgaggaaagtccgtattacatgggtatctacgacggctccatcgctgaagaaaacattcgcaactatgtggataacagcgatgcgatccttaatattggcgcgaaactcacagactcggcgactgcgggttactcttatgggttcgacatcgatgacgtggtcatgatcaaccaccaagatttcaagttaaatgacactgtggcttctgaatttaccctgtccaacctggtgaacggcctattgaacattgaatacaaaaacgatgcaaactttcctgaaaacatacgcgaggaaaaaggccagtacactccgaacaatgcaccgctgacccaagaaacgtacttcaagatgatgcaagacttcattggtctggatgacatcatcctggccgaacagggtacctccttcttcggagcttatgatctgaacctgtacaaagacaacaccttcatcggtcagcctttatggggctccataggctacacgctgccggcaactatcggcacacagatgtcaaacctgtaccgtcgtaacatcctgctgataggtgatggttctctacagctcaccgctcaagacatctccactatgattcgtgaggatctaaaaccggtaatttttgttattaacaatgatggctatactgtagaacgtaagattcatggggagcatcagccgtacaacgacatccagatgtgggattacaaactgctgcctgtagtttttggcggtaaagataaagtggctatccacgatgttgaaacgtctgcggacctggaaaatgttttcctgcaaatcaacaatgagcccaaccagatgcatttcatcgaagtaaagatgaccgctagcgatgcacccgaaaagctggacgctatcgggaaagctttcagcaaacagaatagc

SEQ ID NO: 507 - DNA, 1653 bp, Artificial Sequence
  Synthetic polynucleotide
atgacatacacggtatctgattatctcttggaccgcctgaatgagcttggcctgcgggacctgtttggggttccgggtgatttcaacttacagttcctggaccatgttatcgaacacgaaggtattgtgtgggtcggcaacgccaacgaactgaacgctggttacgcagcggatggctatgctcgtgtgaatggcatcggtgctctggttactacttacggtgtaggtgagctgtcggcaataaacgcgaccgctggatcctacgccgaacaagtcccagttctgcacatcgtaggcgcgcccagcaaagacgcccaggcagctcacctaaccatgcatcacaccctgggtgatggtgacttcactcattttattcgtatggcttcagaagttagttgcaccgtggcagacctcgaacacgcgactgccgtttccgaaattgatcgcgtgcttagggagatgatgatccacaagcgccctggctatattctgctagctaccgatgtagcgagagtagaagttgacccgccggctgcgccgctgaacgtccctgctaaactgtcttctccgggcgcacgtgaaagcttccgtaaagatctgactactctgctggccggtaaaaagaccacggtcttagcggacttgctggttcatcgtatgggagcacagagcaatttaaccgagatgctggatgctacagggttgccgtacgctactctgatgtggggcaaaactctggttgatgaaagtaaaccagaatttgccggcatctacgctggtgtggtatccaacgaacgtaccaaaaaggcagttgaggatgcggagatcctgatctgtgctggtgttacgttcactgacaccacgacggccgggttctctcagaacctgccggaacacactgtgttcctggacgcacaaaccgctcgtctgggacgtaaaacctatgcgcccttaactctggatacctccctcgatatcgtccgcgaagttgctctggaggtcggcgcgttgccacaggacctgctgccgtgggaagaagaagatcatgcggacattgacatggatgcaccattaacacaggacgtgctgtggtctctgctgtctcgcgaactcacaccgggcaacatcgttgtggcagaccaagggaccagcttttttggtatggcaagccgccgtttcccggaacgctccatgttcattggtcagccgctttggggctcgatcggctacactctgccggcgatgatgggcgctgccatcgccgatcgagacgcccgtggtgtgcttctgatcggtgatggctccgctcagttaaccatacaggaactaggtaccatgctcgaacagaaaatcaatccagtcgttgtattgattaacaacgatgggtacactgtggaacgtgcgatccacggcgcaacccagccttacaacgatattcgtacctataactggcaactgctgcccgcagctctgggtgctagggaagacgaagttctgatgctgcgtgtaaacaccgccactgaactggtagatgctgcgcgcctgacgcagcagactcgtgatcgcctggttttcatggaaatcatgatggacaaagatgacgtaccggccctactggcggacgttgctagcgcgctgactcgtgctaactct

SEQ ID NO: 508 - DNA, 1692 bp, Artificial Sequence
  Synthetic polynucleotide
atgtcggacatcacattgggtagataccttttcgaacgcttaaggcaagtagaggtgcagacgatttttggcctgccaggggatttcaatctgagtctcctggacaaaatatatgaagttgaaggtctgcgttgggccggcaacgcgaacgagctgaactccgcttacgcagctgatggttattctcgcgtcaagggcatctctgcactggttactacttttggcgttggtgaactgtcagcgctgaacggtattgctggttcctacagcgaacacgtgggcgtgatccatatcgtaggggttccgtcaatcagctctcaggccaaacagctgctgctacaccataccttaggcaatggagacttcaccgtattccaccgtatgagctccaacattagccagaccactgcgtttatcaaagatatcaactctgctcctgctgaaattgaccgttgcatccgtaccgcatacgtctaccaaaaacccgtttatctagcagtcccggcaaacctggtcgatgacgtggttagttctaaccttctgaatactccgattgatctgagcctcaaagctaacgaggaagaagccgaatcggaagtgatcgaaaccgtatgtcagatggttgagaacgcgaagaacccggttatactggttgatgcgtgcgctgcccggcataatgtcaaagctgaaactaaagagctggttgacgcaacccagttcccagtattcgtgactccgatgggtaaaggcgttgtggacgaacagcaccctcgctttggtggcgtctacgttggtacgctctccaagccggatgtgaaagaggcggtagaatccgctgatctggttctgtctgttggagcactgctgtcggacttcaacaccggtagcttctcctattcttacaagaccaaaaacatcgtggaatttcacagcgatcatatcaaaatacgtaatgctacatttccgggcgtacaattcaaaccggttttgcagaaactgaacaaagtaattgctgcgtctgttaaaaactacatcccagttcctgtgccgtctttaaagctgactaactcgccggccggtgctaacacgccgctgacccaggaatggatctggactaaaatgagctcctggcttcgtgaaggggacattgtcctgaccgagactggcactagcgcattcggcatcatccagacacgctttcccagcaatactaccggtattagccaggtactgtgggggtctatcggctacagtgtgggagccaccctaggtgctgtagcggcggcagaggaattggataaatcccgtcgcgttatcctgtttgtaggcgatggttctctgcaacttactgtccaggagatttcgaccatgatccgttggggcttaaacccgtatattttcgttctgaacaacgacggttacaccatcgaacggctgattcacggcgaacgtgcccaatataacgatatccagtcttgggaccacctggctctgttgcccacattcggggctaagaactacgacgctgttcgcgtgtctaacacgggtgaatttaacaaaatttgtgacgacaaagagttcgctgaaccaagtaaaatccgtctgatcgaagtcatgctgccgaccatggatgcgccgcagaatctggtaaagcaggcgcagctaaccgcttcaacgaactcgcaacaggag

SEQ ID NO: 509 - DNA, 1653 bp, Artificial Sequence
  Synthetic polynucleotide
atgcagacgccgtacactgttgcggactatctgttggatcgtctgaccgactgtggggcagatcatctatttggcgtacctggtgactacaacctgcaattcctcgatcacgtgatcgcttcccccgacattggttgggtcggctgcgctaatgagcttaacgccgcttacgcagcggatggttatgcacgctgcaaaggcttcgctgccctgttaactacctttggtgttggcgaactgagcgcgatgaacggtatcgctggctctttcgcagaacacgtaccggtgctgcatatcgtcggagcgccaggatcggctagtcagaagaaaggcgaactgctgcaccacactctgggtgacggtgaatttcggcatttctacaaaatgtctgagccggttacagttgcgcaggcccacctgaccgaacaaaacgcttgttatgaaattgatagggtgctaaccgagatgctgcgcgaacgtcgtcctggctacatcatgctgccggcagacgttgctaaaaagccggcgactccgccagtatccgccttaattgatcgtctgtatgaaagcgactccttccgcttggatgcatttcggcaggctgctgaaaaacgtttagcggccagcgagcgtacggcccttctggctgatttcctggtgctgcgctacggtttgcagtcacagctgcaacgttgggtggaacagaccccgatggcgcatgctactctgctcatgggcaaaggtatcttcgacgaacgtaaaccgggtttcgctggcacatactctggttctgcatccgccgcgggggttaacgaagcaatagaaggcgcagataccgttatctgcgtcggtacccgattcacggataccctgactgccggtttcacccacaagcttactcagcagcagactattgacgtccaaccgcacgcttcacgcattggggatgtttggtacactggcatccctatgacgcaggcaatcgaagttctatcgtccctgtgccatcagtacgcttctgctaccacggcgacccgtcctgcgcgccaattacacgccgttcacccgggcactctctctcaggacagcttttggcagactctgcaaacctttatccgcccaggcgatatcattctggcagaccaggggaccagcgcttttggtgcgggcgcactgcgtctgccggaggacgtaaatttcatcgttcagccgatttggggcagtatcggttacaccctggccgcagcttatggagctcagactgcctgtccggaccgacgtgtaatagctatcaccggtgatggcgctgcacaattaacaatccaggaactgggtagcatgctccgtgacaaacagcgtccagtaattatggttctcaacaatgaagggtatactgtggaacgcgcgatccatggtccgaaccagcgttacaacgatattgctctgtggaactggactcagatcccccaggctctgtctctggactgccaggctgaatgctggagggttagtgaggcggtacaattagaggaggttctggagaaagtcgcacatccggaacgtttgtcactgatcgaagtgatgctgcctaaggctgatgttccgccgctgctgtccggcatcattcaagcactggaggcccgtaaatcagca

SEQ ID NO: 510 - DNA, 1647 bp, Artificial Sequence
  Synthetic polynucleotide
atgaagacgacagtaggtaattacctcattgactccctgaaagagtatggcgtcaaacacatatttggggttccgggcgattacaacttgagcttccttgaccaaattgatgactcagaagatatcgaatggatcggtaactgtaacgaactgaacgcctcgtatgctgcggatggttacggccgtatcaaaggcatggcagctatcgcaactactttcggtgtgggtgagctgtctgctgttaatggcattgcgggatcttacgctgaaaacgtaccagttgtgaagatcgtcggcatccccagctccaaagttgttgaaaacagaaaactggtgcatcacaccctgggtgacggtgagttctatcgttttaacgaaatgttcaaagaagtaagtgtggcgcagaccatattaaacgaaatcaacgccaaagaagaaattgatcgcgtactcagggagtgctacctgtacaagaaacctgtttatattggaatgccggtcgacctggcaaccaaggttatcaacgtaagcgaaaaaacttcatacaatttggaatctgataaaaattctctgaactcctttatctccaacgtgaaaagcctgatgtctaacagtaaaaaacagatgatcctggctgacttcgaagtgaaccgttataacctgaacaaagagttacaggaatttgttgaagcaagcaacttgccggtttcctctctggctatgggcaagggtgttattgatgaaacccatccgaatttcgtcggcgtttactctgggagcctgtcaaatgaaaacatcactaagctggtcaaatcttgcgacctagcattcctaatcggtgttaaactgactgacagcatcacggcggggttctcttacattaacaagaacatcaccctggtggaggtacacccactgtattgtcgcatcggtgaaaacttattctctaatattctgatgaaagatgctctggagtcgctgaaaaatttgaacgtcgaattttcgaaaaacgacactccgcatgtaagcctgattaacaatttcgaagctactaacacccctctgacccaaaaacgttttttccagggcatcgagtcctttctgaacgaaaacgatatcctgattgcagaacagggcacgtcgttctttggatcctgcctcgttaatatgaagaaaggctgcacattcatcggtcagccgctgtggggtagcatcggttacaccgtaggcgcgctgctgggcacccagatcgcggaccgcaaccgtcgcaacatcctgctggtaggcgacggttccttccaactgactgctcaggaagtttcgacgatgattcgtgagaacctatctccgattatcatggttatcaacaatgatggttataccgttgaacggctgattcacggtccgaaccgcaaatacaacgatatcaacatgtgggattactcaaaacttgtgtccgttttcgatcttgagggtaaccgtagtatatcattcaaagccaaaactgagattgagctgatgaacgctttaaaggaagctgacaacaacaaagacaaactgacctttattgaagtgtgtatggacaaaatggatagcccccagttactgaaggacctgggcgagctgttctctaaacagaacagctat

SEQ ID NO: 511 - DNA, 1719 bp, Artificial Sequence
  Synthetic polynucleotide
atgtcgagcgacacagttaaactgggcgattacttgttcactaggctcctgcaactgggggtggccgacatttttggtgtcccaggcgattataaccttcggctgttagactacgtagttcctgctggtctgcattgggtaggtaattgtaacgagctgaacgcagcttacgcggctgatggctatgcgcgcatcaagggcctctccgcactggttaccactttcggtgtgggagaactaagtgccgctaacggtatcgctggcgcaaatgcggaacgtgccccggtagttcacatcgtgggcacgccgccgcgtcccctgcaatctacccgagcgctgatgcaccatacttttgcagacggtgaataccgccgtttctctgctatggccattcacataaccgctgcgcagatcaacctgaccgatactaccactgctcctgagcgcattgactggatcatccagcaggcgctgattcaccagcgtccggtttatctcgaaatcccggacgatatgccggacctgttcgttagctccgcgaacctgaaaaccccaatccgtgtccccctggtaccgtctccgccccatgaaccaaaagttgtttcacgtattttggatcgcctgtacagcgctcagcgtccattcatcttagtggacggagagtcaagatctttaggtatcctggatgaactggacgcattgatccagaaaactaactggccgacgtggactaccgtttttggtaagggcctggtaaatgaaagcttgccgaacgtgtacggcctgtatgctgcatcctttggggataaaccggctcaggagtacttcgaaaccgccgatctaatactgactttcggcccgcactatagcgacaccaactcttacttctggacaactgtaccgaaagatgcagttgcgattactttccgcgatgataccattcagatcgaatctgacacctaccgtgatatcagcgccggttccgttcttacccaagtcctgcaatccctggacgctactcgtacgacgaaagcttctggcccttccaaagtggaagttaccacatccgacattaaagacacggatatcatcgcacagaacaacttttaccgcctggtgaacccgattttccatgagaatgacatcgtgctggcggaaactggtacggcaagttatggcggccgtagttttaagctgcctcctaacacccgtttcttcagcgcggtaacgtggctgtctatcggttacatgctgccggctactctcggtgcggcactggcgaagcgtggtcagaataaagtcaccggcgcttcttcgcaggctgttcttgtcattggcgatggtagtctgcaaatgaccgctcaggaaatcagcgttatgataaaagaaaacttaaacatcctgatcatcatcattaacaacgaggggtatactattgaacgcgtaatccacgggcgtaaacagccttacaatgacgtgccgttttggcgccacactcaggctctgtcgtacttcggtgctaacgaggaacagatcgcaaattcggttttcaccgctcgtacctgcggtgaactgcgtgaggttctgaaaaacgaacgcgtacacagcggcacagggctgcgtatcgtggaagtcgctatggaacgcgaagacgtccaaggccccctgctgtacctgctcaacaagcagatcgctgaggaacaggctgcaacatctaac

SEQ ID NO: 512 - DNA, 1653 bp, Artificial Sequence
  Synthetic polynucleotide
atgtcggggctgacagtttctgactacttgctgcaacgcttaaacgaaatcggtattgatcacctcttcggcgtgccaggtgactttaatctggcattcctggatcgtgtaatcgcccatcctcgtctggcgtgggtcggctgtgctaacgagctgaacgctgcttatgcggcagatggttacgccagaagtcgccgtgctggcgcacttctgactacctttggcgttggtgaactgtccgcgattaacggtatcgccggttcctatgctgaatacgtgccggtaatacacatcgttggggcaccgtctctgagcgctcagcagcggggcgacctgatccatcacagcttaggcgatggagacttctctcacttcctgcgtatgcagcgcgaggtcacggtagcgcaggcgactctgaccgcggacaatgcttgcgttgaaattgatcgcgttatgcgtgaagccctaacccagcgccgtccgggttatctgcttctgcccgtggacgtggcaggcgctccggcgtgcagccctggacaaccgttgactttgcagacccaaccggatgatcaggctctgcaagcttttcgttgtgcggctgaagcactgctgtccggtgcacgttcggtttctctgctagctgacttcttagccgacaggttcggcgtgcagcagcagctggcacattggctggagacggttccactgccgcacgcgactctactgatgggtaaaggcgttttggacgaacagcgcaccggtttcgctggcacttacgcaggcgaaggttgcgccgatggtacacgtcgtgtgattgagcaggctgatgtaatcatcaccgttggggtccgcttcaccgacacgatcaccgtcggttttactcagcagatcggcactgcgaagaacattgatgttcagccatttagcgtaactgttgccggtcagcgttttgattcactcccgatgtccactgtgatcgaagaacttcgtcaactgtgccagagatacgctgcgcgttggaccctggactactgccaacctgcaccgctcgctgcgaacgatcagccgggcctgactcaaaacgcgttctggcaggcaattcaggcattcctgcaaccgggcgacctgctggttgcggaacagggtacggctgcatttggtgctgcggctctgcgcctgccgaccggcgcaaaactggtggttcaaccactgtgggggtcgatcgggtacacgctgcccgccgccttcggcgcgcagaccgctgagccggagaggcgcgtaatactgttaatcggtgatggcagcgctcagcttactgtacaggaattatcttcaatgatgcgtgataacctgaaacctctgatctttgtcttaaataacggtggttacaccgttgaacgtgcaatcaacggtgcaagtcagcgttataacgacattgctgattggaattggactcagatcccgcaagcgttatctaccgcttgcccggcccagagttggcgcgtgcttgagacagtacagctgactgaagtgctcaaactgatcgctgacgctcgtcgcttgtctctggtggaagtagtattgccgcgtctggatatgcctccactgctgcaacaggtgtccgctagcctgcaccagcgtaacagcgcacag

SEQ ID NO: 513 - DNA, 1674 bp, Artificial Sequence
  Synthetic polynucleotide
atgtcggagaacgcatatactgtgggcgattaccttctggacaggctcgccgaactgggggtaaccgaaattttcggtgttccaggcgattaccagttggaatttttagaccacatcctagctcatccccgcgttcgttgggtcggaggtgcgaatgaactgaacgctggctatgctgcggacggttacggtcgtctgcgtggcatggccgcactggttacgaccttcggtgtgggcgagctgtccgcagctaacgctgtagcgggcagctacgcggaacacgtcccggtggttcacatcgtaggtgctccgtctaaggatgcgcaaggagcccgccgcattgttcatcacacactcggtgacggcgattttgatcatttcctgcgtatcagtcgggaaataacttgcgctcaggcaaacctggtccctgctactgccacccgtgagatcgaccgcgtactgagcgaagttcgtgaacagaaacgtccgggttatctgctgatcgcgaccgacgtggcacgcttcccgactgagcctccggctgctccgcttccacgttacacggccggcacctctccccgagcgttgacactgtttactgctgctgcggcagaactgatcgacaaccacagaattgctgttctggcagatttcctggtgcaccgtctgggctgtgttaaagaactaaatgcgctcctggctgccgataccgttccgcatgctactctgatgtggggtaaatcactggtagatgaatcctctccgaactacgttgggatttacgcaggtgcagcatccgaagatagtgtgcgtgaagtaatcgaggacgctccggtcttggtcactgcgggggtgctgtttaccgacatggttagcggcttcttctctcagcggttagatccagctaggactattgatatcggtgtaaatcaatcggtgatcgcaggccaggtttatgccccgctggacatgtcggcggctctggaagccgtgacagcaattttaagcgagcgtggtataacctctccagaactgccgcctgctccgacgcgcatgcagacccaagccccgggtcgcgacgctacactgacccaggaagctctgtgggactccctgagtcaggcccttactccgggcaacgttgtactggcggatcagggtaccagcttttatggcatggctgggcaccgcctgccgtcaggcgtcactttcatcggtcagcccctgtggggctctatcgggtacaccctgccggctgccctgggtgcaggcctcgcagatcgttcccgacgtactgttctgctgatcggtgatggtgcagcgcaactgaccgttcaggaattaggcacttttggacgcgaaggattagcaccggtagttgtggtggtcaacaacgacggctatactgttgagcgtgcaattcatggcgttaccgcggaatacaatgacatagctgcatggcgttggtctgacttgccagcggcgctgggtgttacggacgctctgacgttccgtgtaactacctgcggtgaactggcggatgcgctggctgctgcggcggccactgctgatcgcatggtattcatcgaggctgtcttggcaagaatggacatcccgccgctgctgactgagcttgctcagagcgcaagcgaagctaactctcgcggcgcaagt

SEQ ID NO: 514 - DNA, 1653 bp, Artificial Sequence
  Synthetic polynucleotide
atgtcgacgacaccaactgttatcgactatgtgcttcgccgtctgcatgagattgggatcagcgatgtatttggcgtccctggtgacttcgcgttccccatgcacgatgcaatagttgctcacccggaaatcaattggattggttgctgtaacgaattgaacgctgcctacgcagctgatggctacgcgcgagtacgtggtgttggcgctgtgtctactacctatggtgtcggcgaattaagtgccatctccgcagtagccggtgcttacgcggagcacctaccggtttttcatctggtgggaatgccgaacctggctacccaagcgaatagagcgctggttcaccatactctgggtaacggcgaatttgaactgttccgtaaaatggcagacatcgtggtaggcgcgtctgctattatcaccccggctaacgttgtttctgaaaccgaaaggctgattcacgaggcactgtacaaccgtcgtcctgtgtatctcgccttcccgactgacgtagttgataagccgatccttgcgactagcgctccattgccgctgccggtctccgaaccggaagccctgaccgctgctgttgacgcagttgctcaggcactgtcagctgcgtcgactgcgtgcgttctgccgggactgctgctgcatcgtctccacatcaccgatatcgcaacgcagttcgtagatgctgcgggtctacccttcgctaccatgtttgctgacaaaagcgccattgacgaggatcaccctcgctacatcggcatgtatgacggtcagctgatggaagaggatgtgcgcgtcttcgtagaatctgccgatgtggttattacggtggggacaatgcagactgatttcaatacgggcgcatttactgcacgcctggacccagctcgcaccattgacataggtcttcaccgtacgactgttggtagcgctgtataccaaaacgtggaaatggccgatgttctgcgtgaactggcgtcccgtgcgtggaccaaacgcttcccgccgggccctcggccgacttctctgggccctgtcgtaggtagtgctgctgagccgatcacagccgcagctctgtacccccgctgggccgacttcctgcgtgaagatgacatcgtcatcgcggaaaccggtacctgtagcatgggcctggcattcgcgcagctcccacatggggctcgtttttacaaccagaccctgtggggagcgatcggctgggcaactccggcgtccctgggtgccgctgtagcggcaccggacaggcgtgttgtattgattaccggcgaaggttctcaccagttaactgttcaggaaatctctcaattccaccggttgggcctgcgtccgattatcttcgttttaaacaactccggctatctgatcgagcgtctgctgtgcaaagatccggggattgtttataacgatgtagctacttggaattacgcagaactgccccatgcgctaggttgcgatgactggttcactgagcgcgtgaccacctgtggcgagcttgacgaagcactggcaaaagccgctcagggtgaccaggctacatacattgaagttgtgactgatacttacgaggccccgcccctgccgaacaagctgcacgaaaacgttaaaaccctgtacaacatcggt

SEQ ID NO: 515 - DNA, 1674 bp, Artificial Sequence
  Synthetic polynucleotide
atggtagtgacggagcctgtttacaccgttggcgattatttactggaccgccttgcggaactgggtgtcactgaaatctttggggtaccaggagactacaacctcaaattcctggatcatattgttgcccaccccgctatccgttgggttggcaatgctaacgaattgaacgcaggttatgcagctgacggctacggtcgtctacggggtatggcggctgtggtcactaccttcggcgttggcgagctgtccgccacaaatgcaattgcgggtagttacgctgaacacgtgccggtagtgcatatcgttggaggtccgaccaaggatgcccaggtggcgcgccgtgctttacaccatagcctgggtgatggcgactttgaacacttcttccgtatatcgagagagatcacgtgtgcacaagcgaacctgatgccggctactgcttgccgcgaaatcgaccgtgtcctgtgcgaagtccgtgaacagaaacgcccgggctatattctgctgtcaagcgatgtagcgcgtttccctaccgaaccgccagcagatccgctgccgcgctacactggcggtacctctccgcgtgccctggctctgtttactgaggcagctactaaactgatcgacgaccaccagctcaccgtgctagctgatctgctggttcacaggttgcatgcagtttccgaattggaagcgctgcttgcagccgatgttgtgccccacgccacgctgatgtggggtaaatctcttctggacgaatctagccctaactttctggggatttacgctggtgcagcttccaccgagcgtgtacgcgtagcgatcgaagacgctccggttctggtgaccgctggcgtagtattcactgacatggtttctggtttcttcagccagcgtatcaacccggcacgcactatcgatattggccagtatcaatcctctgtgggtgatgaagtttttgcgcctctggaaatgggcgcagctttggctgccctgaccgagatcctaaccagacgtggtgtttcgagcccggccgttgctgcgccgccagaagcgccgcctccgatcactccggctcgtgacgagccgctgacccagcaaatggtatgggatcgcctgtgcgccgcactgacccctgggaacgtcgttctggccgaccagggcactagcttctacggcatggcggaccaccgcttgccacacggtgttacattcattgggcagccgctgtggggatcgatcggctacacgctgccggcagccctgggtgctggcctggcgcatccggagcgtcgtaccgttctgctgattggtgatggtgcagcgcagttaactgtccaggaattgggcacttttagtcgtgaaggcttatctcctgttatcgttgttgtgaacaatgacggttatacggtagaacgagcaattcacggcgagacggctccatataacgatatcgtcggttggtcctggacagaagtaccaaacgcgctgggcgttactggccatctggctttccgcgcgcagacctatggcgagcttgatgacgcatttacagctgccgcagttcatcaggaccgtatggtgtttgtggaagtggctctgcctcgtctggaaatcccgcgcctgctgggtcaactggtgggctctatgtcaccgccggacgatcgtcgc

SEQ ID NO: 516 - DNA, 1677 bp, Artificial Sequence
  Synthetic polynucleotide
atgacaatcacggacggttttgtgtcagttgggcaatacttagcgactcgccttctgcaactcggcgtccgacacgtattcggcttgccgggtgatttcaatttaaacctgctggatgaaatggccaccgttgagggtattgaatgggtgggctccagtaacgaactgaacgctgcttattctgcggacggttacgcacgtgttggccgttgtgctggagcactggtaaccacttttggtgttggcgaactgtctgccctgaacggaatcgcgggctcgttcgctgagcatgtgcctgtaatccacattggtggcctgccggcgcgcgccagcatggatagctctgcaccactacatcacaccctgctagacggtgactatggtcacttcgtccgtatgtttcgcgaagtgactgttgctgatgctatcattgacgaggctacggcagccggcgaaatcgaccggctcctggttgctatgatctccgcaagcaagccggtgtacctcggcgtacccctggatgtagctaaagccccggtttccgcgcgttctcttgatgtaccgctggcccctcttgcaagcgatccgcatgctctgtcagcgttcgctgttgccctgtcgcgtgaatttgcggacgctcgtagcctggtcgttctggctggtccagacatacaccgtcgcgggatagaacgcgatgttgcagagctggcagaactgccaggtatttctatcgcgtcccagtcgggttctaaagctatcttggacgagtcacacccgtctagcctgggcacctacctgggggctaccactcgtaatgcagaatcccgcgctagagtcgatgacgcggaacacctggtgatgattggcactgcgttcagtgatttcacaaccggtttctttactcatggttatgacccggcttccgcagttgagttggctttggatcatgcgcgtatcggccacgcagtataccctggtgttcgtctggacgacgctgtcagggctctgcgtcacgcggcggaactcgctccgctgcaagtgggccctgtaatcgaaccggttgctgccgcttcccgcgttaccgtagaaggagatagcgccctggctcacgattctttttggccggagatccaggattggctggaaccggacacgaccattgcggctgaagcgggtactgcattctatggggtgctggacctggacctgccagaacggagcgacctgatgggccagccgatctggagctcgatcggcttcactcttccagccattttcggtgcaatgttagcaagacccgatcgtcgcccggtactctttatcggcgacggttccgcacagctgactattcaggaacttgggcatctttacgcttacggccgcaacccggtggttttcctgctggacaacgatggttacaccgtagaacgtaaaatccagagtcctgatgcccgttaccaggatattgtccgctggaactgggacctggtgccggctgctttcggagctgatgacatctctgttttatctgcatctactagcgcggaactgcaaaccgccctgtctcgtgctcgtgcggcagatcgtggcgcgttcattcgcgtggtactgcctaaatatgacgcaccgcgtctgctggaagttctggcccgcggtatcagtgaggtgaataagcat

SEQ ID NO: 517 - DNA, 1647 bp, Artificial Sequence
  Synthetic polynucleotide
atgaacaagacggtagttgaatacatgttgaatcgcctgtatgacctcggcattagcgatgtgtttggggttgcaggtgactacgccttcccgatcgaggataccatttgcaactccaaccatatccgttggatcggtaactgtaacgaactgaacgctgcgtatgctgcggatggctacgctcgtataaaaggtatggcagctctttctactactttcggcgtcggtgaactgtcggccatcaatgcaattgcaggctcttacgctgagaacctgccaatcttccacctagtaggcatgcccgcgtcaggagttcaaaaaagtaaacgactggtgcaccataccctgggtaacggtgactttgatatcttctaccagttagctcagcgcctggcatgcgcgcacgccatactgacacctgaaaactgcattgctgaaatggaacgtctgatcgcgaccgctctgaaggagagacgcccggtctatattggccttccgtccgactacgcggtgatgccggttatcgaaaacactagcgttaccactcagaaaaaaccgatctccgataaagagatcctggaaaaagtcgtaagcttgatcattgataagctgacccaatctaacaatatctgtgttctgcccggtatactatctactcggctgggactgagcgacaatgtccaggcatttattgacaaaacgggtctgccgtatgctacgatgttcatggacaaatccatcctcaacgaatctaacacccagtacgtgggtatgtatgacggccagctgatgactccagatgttcgtgaatttgtggaaaacagcgaatacgtattgggcatcggtgcgatgatgaccgacttcaacactgggtcattcaccgctaacatcaaaccagaacagttcattaatatcatgccgaaatatgtagagattgattcggttatatactcttctgtttacatggaagatatcctgtcggagcttactaaacgtctgcctaacaagacctatcaccaaatcaaagtcaagggcctgggtgaagcaatcttatctgacaacggtaaagtaactgcccagtacctgtacccgaggctggaaaaatttttccgtccgaacgatatcattatcgctgaaactgggacatcatccatgggcctgggctttactctgctgccggagggcgcacagttccacaatcagacgttgtggggtagcattgggtgggcaaccccggcgagcttcggcgcagctctggcggccccagacaaacgtgtcatactgatcaccggagaaggttcgcatcagctgaccgttcaagaaatcagccagtttgttcgcttccgcttgaaaccgatcatcttggtgctgaataacgatggttacttaattgagcgccttctgtgcgactacccagaagcttactataacgatctggcgcaatggaattaccatcagctccctaaggcttttggcgctaaagattggcactgtgtaaaagttaccactatcgatgagctgaacaaagctttagaggtggctgaatccacagaaaacgcttcatatattgaaatcgtgactgagcgctatgaatctagtgaactggctaagaagctgaaagaaagcaagtcctctctgtacagcttc

SEQ ID NO: 518 - DNA, 1683 bp, Artificial Sequence
  Synthetic polynucleotide
atgatccacctgaagactcaatacacagtcagtacctatttactggatcgccttagcgagctgggtattgaacatatctttggcgtacccggggactacaacctcgctttcctggacgatgttattgcacacgaaaatgtggaatggatcggcaactgtaacgaattgaacgccgcttatgcggcagacggttacgctcgtatcaaaggtatcggcgctctgattactacgttcggcgttggagagctgtccgcgataaatggtattgcaggttcatacgccgaaaacgtaccagtgatcaaaatcaccggcactcctaccaccaaagttatggagaacggcgcgctggttcatcacacgctgggtgatggcaagtttgatcatttctcgaaaatgtacagagaaatcacagtcgctcagaccaacctgactccggaacacgctgcggaggaaatcgaccgtgtgctgcgtgcctgctggaacgaaaaacgcccggttcacatcaacttgccgatagacgtatataacaaaccgattaataaaccaactgaaccgattcttcacaagccgatcctgtctaacaaagaaacactcgataaaatgctgcttcatgcaatcagcaaaattaactctgctaagaaacctgttatcctggcagacttcgaagttgatcgctttcatgctaaagagtacttataccagttcgtagagaaaactggtttcccaatcgctaccctctccatgggaaaaggtattttccccgaaaaacacccgcagtttattggtatctataccggcgacgtcagctctccgtacctgcgtaagcgtatcgatgaaagcgactgcatcatctcaataggtgtgaaactaactgatacgatcaccggcggtttcacccagggctttactaaggaacaagtgatcgaaattcacccttacactgttaaaatcaccgacaaaaaatatgggccggtagttatgaaagatgttctgcaacagctgtcgaatgtcattgaacacaggaacgaagaaacgttcgatattaagccgtttatctccgaatctctctctatcacggagaagttcaaccctaaaccgcagatggtaactcagaaacgcttttggcagcagatctaccatttcctgcaagaaaatgacgtgctgctggcggagcagggcaccccattcttcggttctgcggcgatcccgctgccgaacgacaccacctacgtcgcccagccgctgtgggggagcatcggatacactctaccggctctgctgggtacccagttagcaaacttgtctcgtcgtaacatcctcattattggcgacggttcattccaactgactgttcaggaacttagcaccattctgcgtcagaacctgaatccgataatctttctgatcaacaataacggctatactgtagaacgcgcgattcatggacagaacgaaccatacaatgatattcaaatgtgggactatacaaagctggccaacgttttcggcactgaggagaaatccctgacttgcaccgttgaaaacgagatcgagctgcaagaagtgctaaccaaaatcagtatcgataaagaccagctgactttcgtggaggtcgttatgtcccagggtgaccagcctgaattactggcgaaactgggcaagcggttcggccagcagaactcc

SEQ ID NO: 519 - DNA, 1644 bp, Artificial Sequence
  Synthetic polynucleotide
atgatgaagaaacgcgttggtgagtacttgatggattgcttaagcaatacaggcgtggaaaaagtcttcggagtaccaggtgactttaacctggcattcctggacgatatcatttcccgtgatgacatcgaatgggttggcaacacgaacgaactgaatgcctcttatgcggctgatggttacgctcggatgaaaggcatctcagcaatggtaactacttttggggttggcgagctgtctgcggtgaacggtattgctggttcgtatgccgaacgtgtacctgtggttgctataaccggggcaccgacccgcgcggttgaagacgcaggcaagtacgtacatcacagccttggtgaaggaaccttcgataactaccgtaaaatgttcaaagagatcactaccgcgcagggctatatcactccggaaaacgctcaaactgaaattccgagactcctggacgctgccctggcagagaaacgtcccgtccacctgcatctgccgatcgacgttgcgatgaccgaaatagaagtggaaagcacttacgaagtccctgaacgcaaagttgaagatgtgtccaagtacattgctatggtaaaagacaaattagagtcggcttctcagccggttatcatcgctggccacgaaatcaactcttttaagctgcacgagcagcttgaagatttcgtaaataaaacacacatcccagttgcacaactgagcctgggtaaaggcgcctttaacgaagaaaacccgtactatatgggtatttatgacggtagtatcgccgaggaaaatattcgtgattacgtagataactccgacgcgatcctgaacattggcgctaaactgaccgatagcgcgacggcgggtttctctttcgaatttgacatcgacgatgttgtgatgctgaaccagcataacttcaaaatgaacgaaaccgtcgctgaggatgttactctaccagaccttatggatgggctgatggaaatggattatgttaacgaggcagactacccgaaatttaaacgtccggagaccggccagtacgaattgaatggggacgctctgacacaggaaacttatttcaagatgatgcaggactttctggcaccttccgatgtcatcctggccgaacagggtacgtcgttcttcggagcctacgatctcgctctgtacaagggcaacaaattcgtaggccaaccgctgtggggttcaatcggttacaccctgccggcgacgatcggcacccagattgcagacccaaaacgccgtaatctgctgctaatcggtgacggttctctgcaactaactgttcagggcatttcgacgatgattcgccagggcctgaaaccagtcctgttcgttatcaacaacgatggttataccgttgaaaggaaaattcacggtgaaaacgaaccgtacaacgacatcttcatgtgggattataaagccttgccggctgtattcggcggtgaggatgtggttaaggtgcgtgacgttagtacttctgaggaactggaccaggcatttgaagcgatcaaagcttacccggatatgatgcatttcgttgaagtaaagatggcgatgcatgacgctccgcacaaattagacgcaatcggcaaagcgttcgccaaacagaacagc

SEQ ID NO: 520 - DNA, 1650 bp, Artificial Sequence
  Synthetic polynucleotide
atgcagacgccgtactctgttgcggactatctgttggatcgtctggccgactgtggggtggatcatctatttggcgtacctggtgactacaacctgcaattcctcgatcacgtcatcgaacaccccagtgttcgctgggtaggttgcgctaatgagcttaacgctgcatacgcagctgatggctatgcgcgagttgctggtgccggcgcactgttaactaccttcggtgtgggcgaactgagcgcgattaacggtatcgctggctcctacgcagaatacgtcccggttctgcatatcgtgggagcgccatgctgcggtgctcagagacgtggagagctgatgcaccacactctgggtgacggcgattttcagcacttctatcgtatgcagcaagccgtaacaaccgcaagcgctgttctcgacgaacagaatgcctgttatgaaattgaccgtgtgctgcgcgcaatgctgaccgagcgtcgcccgggttacctaatgctgccggctgacgtagcgaaacagccggcaactcctccgaacgatccactgatcgtttcccaatctgaacccgcttcatccgtcgctgctgcgttccgttaccatgctcgcgaacgtttgttagactcgccgcgcgttgcgctgcttgcggattttctggcgctgcgcttcgggcttcagccggtactgcaacgttggatggctgagaccccaatggcgcatgccactctgctgatgggcaagggtctgtttgacgaacgtcacccggctttcgttggcacgtactctgctggtgcatcgtccgactatgttaggcaggcaatagaagaagcagataccattatgtgcgtcggcacccagttcgtggatacgctgactgccggtttcacccagcgtttgccgccggaacgcactatcgaggttcagccgcacgcttctcgtgttgggtcacagtggtttaacgtgcctatggaacaggccgtaactactcttcgtgaactgtgcctggaaatgagcttttctttgccaccggagcgacctcctgtggaacgtattcagatcgaaaaaggcctgctgacccaagagaacttctggcacacagttcagcactatctggcaccggacgatatcatcctggttgaccagggcactgcggctttcggtgctgctgcgctgagcctgccgagcggagcagaggttctagtgcaacctctgtggggtagcatcggctacaccctgccggccgcattcggcgcgcagaccgcctgtccggatcggagggtaattctgataattggtgatggtgctgcacaactgactattcaggaattaggttctatgctgcgcgatggccagagtccggttatcctgttactgaataacgacggttacacggtagaacgcgctatccacggcgctaaccagcgttacaacgacatcgctggttggaactggacccaagtcccgcaggctctgtctcgtgaatgccaggccgaatgttggcgcgttaaacaggcggtgcagctggaagaagtgctggctcgtctatcccatccgcaacgcctgtctttaatcgaggtcgtactgcctaaggccgaccttccagaactgctgcgtaccgttacaagagcattagaaagccggaacggtggc

SEQ ID NO: 521 - DNA, 1662 bp, Artificial Sequence
  Synthetic polynucleotide
atggagatcagcatgatgaataagaccgtcattgaatacgttctggatcgcttgtatcagataggtatccatgacatctttggcgtggccggggactacgcgttccctatcgaagatgctgtttgtgaatcagaaaaaatgcgttggattggcaactgcaacgagttaaacgcttcttatgcagcagacggttacgctcgtgtaaaaggtgtagcggctctttccactacgttcggcgttggagaactatcggccctgaatggtattgcgggcgcatacgctgagcacctgccaatcttccacctggtgggcatgcccgcatctggtgttcaaaaaaaccatcggctggttcaccatacactgggtaacggcgattttgatgtcttctatcagatgagccagcacctgagctgcgcacacgcgatcctcactccggaaaactgtattgccgaaaccgagcgcctgatcaccactgccctgcaagaatcccgtccggtgtacctgggattcccgtctgactacgctgtaatgccgattaaggctgacaaaaccagtgaaactatcactatcaacaaatcccattctgaaagcttgagcgctgctgtcaccgcgattgttgagaaactgacctctagcaccaaagcgtgcattatcccgggcatcctgacggctcgttttggtctgactactgatgtggaagctatcatccagaaaacgggtctcccatacgccaccatgtttatggacaaaggcgtattgtccgagtctaactctcgatacatgggcatttataatggtaagctgatgaacccggaagtacgcgaatttgttgaatcctgcgactgcgttatggggatcggggccgtgctgactgatttcaacagcggttcgttcacagcagcaatcgcacctgagtcttgtataaacattctttcagatcacgttaaagttggctccgcgatctatccgaacgtactgatgaaagatgtcctgcacaagctgaaagaactggttccgtctctgaaccacgtaggtattaaggcacaggatctgggctctccacagcaaggtgaaaatggacagatcacggctagttatctttaccctcgtctggaaaaaatgttccgtaaagacgacatcatcattgcggaaaccggtactgctagcatgggcctgggcttcgcgctcctgccggaaaacgctcaattccataatcagaccctgtggggtagcatcggctgggcgacaccggcggcctttggtgccgctatcgcggagccacacaagcgtgtcatcttggtgaccggtgaaggctctcaccagttaactgctcaggaaatctcccagttcgcaagatttggcctgaaaccgattattctggttttaaacaacgatggatacctgatagaacgcctgctgtgcaaaaacccggaggcttattacaacgatctgccccagtggaattacgcacaactgcccgccgcgttgggttgtaaagactggtactgccagcgcgtgaccaattgtatcgagcttgacaacgcaattaagcaggctgaattatctaaccacgctgcatacattgaggttatcatggaccgttatgcagcctcagaactggcggaaaaactggggaagtcagttgcttcgctgtacagcttc

SEQ ID NO: 522 - DNA, 1641 bp, Artificial Sequence
  Synthetic polynucleotide
atgacaagcgtgatcgaatatgtactctctcgcctttacgatctgggcattcgtgacatcttcggtgtccctggggactacgcatttccaatagaggatgcggtttgtgccgacccgcgtttgcgttggatcggtaattgcaacgaattaaacgctgcttatgctgcggatggctacgcacgcctgcatggtctggccgctctgtccactaccttcggcgttggcgaactgagtgcactgaacggtattgccggtgcttacgcggagtcgctgccgctgtttcacctggtgggaatgccggcgtctggcgtacaagcagctgggaagctagttcaccatactctgggtgacggcaatttcacgcacttcgctcaggcaagcgccgcagtagtctgcgctcacaccatccttacccccgaaaactgcgttgctgaaatggagcgcctgatcgatgcggcgctgagataccgtaaaccggtttatattggtatcccgtcagactacgcagtaatgccgttttccgctacgactaccccttcgactccactgcgttctgatccccagaccctagccgaagttagcgcgcagatcgtggaacgcctgcaacagtcccagcaggcctgtgcgctcccaggaatttatctgacacggcaccaggtgcgtcaagaagctcaggctttaatcgaggcggctgacctgtgcttcgcgactatggtcatggataaatctgttttggacgaaagccatccgaactacattggcatgtacaacggtcaccttttgaacccggaagtgcgcgatttcgttgagcgttgtgactgcgttctgctgatgggcaccctcctgagcgacttcaatacgggtggctttactgcgcggctggatccatcccactgcatcaccctgctgccggaatcagtgcgtattggtgctacggaatattctcaggttctgctcaaagatgtgctgaacgctgtcgctcaacagatctccccgctaccgcgacctgcaaacgccccgcgcgcccagcctctggcacccgttaacgcctctggcgcaatcaccgctccttacctgtacgcgcgttggcaacagatgttacgcccggatgacatcctggtagccgaaacgggcactgttagcatgggtctgtcctttgcgctgctgccgcgtggagcatctttccataaccagactttatggggtgctataggatgggcgaccccggctgccctgggcaccgcaatcgctgcaccgactcagcgaacgattctgatcagcggtgaaggctcccaccagcttaccgtccaagagatctctcaatttgcacgtcatggtctgaaaccgctgattttcatcttaaacaatgatggctatttgatcgaacgtctgttatgccaggacggtgaggcatcatacaacgacctggctcagtggcagtatgcacagctaccgcccgctctgggttgccagggctggttctgtgctcgtgtatctacatgtgaagcgctggatgaagctatccgccatgccgagcactgcgactctgccgcgtacattgaagtgattaccggggaatacgttgcgtcgccgttagcagagaagatgcatcaggcgatggctagcctgtaccacgctgat

SEQ ID NO: 523 - DNA, 1644 bp, Artificial Sequence
  Synthetic polynucleotide
atgtacacggtgggccaatatctggtcgatcgcttggaggaaataggtatcgacaaggtattcggggttcctggcgactacaacctcacttttctggattacattcaaaatcacgaaggtctttcttggcagggtaacaccaacgaattaaacgcggcttatgccgctgacggctacgcacgtgagcggggcgtttccgcactggtaactaccttcggtgttggtgaactgagtgcgatcaacggcacagctggtagctttgctgaacaggtgccagtaatccatattgttggatcaccgaccatgaatgtgcagtctaacaaaaaactggtccaccactcgctgggcatgggcaatttccataacttcagcgagatggccaaagaagttactgcggctaccactatgctgaccgaagaaaacgctgcttccgagatcgatcgtgttctggaaacagcactgttggaaaaacgtccggtctatattaacctgccgatcgacatcgcacacaaggcgattgtgaaaccggctaaagccctacagactgaaaaatctagcggtgagcgcgaagctcagctggccgagatcattctatcacatcttgaaaaggcagcgcagcctatcgttattgcgggccacgaaatcgcacgatttcagatccgtgaacgcttcgaaaattggatcaaccaaacgaaactgcccgtgaccaacctggcgtacggtaaaggttctttcaacgaggaaaatgaacactttatcggtacttactatccggctttcagcgataaaaacgtactcgactacgtagacaactccgattttgttctgcatttcggcggtaagatcatagacaacagcacctcttcctttagccagggattcaaaacggagaacactctgaccgcggctaatgatatcattatgctgcccgacggttctacttactccggcatttccctgaacggcctgcttgctgaacttgaaaaactgaacttcactttcgctgataccgccgcgaagcaggctgaactggcagtttttgagccgcaagcagaaaccccgttaaaacaggaccgtttccaccaggctgtcatgaatttcctgcaagccgatgatgtactcgtgaccgaacaggggaccagttcttttggtctgatgctggcaccgctgaagaaaggaatgaacctgatttctcagacattgtggggcagtatcggctacactctgccagcgatgatcgggagccagatcgccgctccggagcgccgtcacatattatctatcggtgacggctccttccagttaaccgcgcaagaaatgtcgaccatctttcgtgaaaaactgactccagttattttcattattaacaacgatggatatactgtggaacgcgcgatccatggtgaggacgaaagttacaacgatatcccgacctggaacctgcaactggttgcagaaacctttggcggggatgcagaaactgtagatacgcataacgtattcaccgaaactgacttcgctaacacgctggctgcaattgacgcaactcctcagaaagctcacgtggttgaggttcacatggaacaaatggacatgccggaaagcctgcgtcagatcgggctggccttatcgaaacagaacagc

SEQ ID NO: 524 - DNA, 1659 bp, Artificial Sequence
  Synthetic polynucleotide
atgtcggagcacgcatatactatcgccgattaccttttcgacagggtcgcggaagctggcgcgaccgaagtttttggtgtaccaggggattacaacttgagcttcttagacaatattatcgcttctgacaagctccgttgggtgggcaacacgaacgaactgaatgctggatatgcagctgatggttacgcacgcgaacgtcgttttgccgcgatggttactaccttcggcgtaggtgagctgtccgctattaacgcgaccgctggttcattcgcagaatacgcgccggttctgcatatagtgggcgctccggacactgagctgcggaaaggcaaacgccgtctgcaccattctttaggcgatggtgaatttaaccacttcatcaaaatggccgaacccgtaagcgttgcgcgtgcagaaatcacagctaaaaacgctgcttctgaaatcgatagagtgattcgcatggttctgaagaaacaacgtcctggttatctgctgctgtccccggacatcgccaaactgccgatctacccgcctaccactaaattgaaagacagtgaggaagatattaccagccagatggctctggcggatttcaaagaagagctggccgcctttatccagggaaaggctacgactttgatagcagacctgatggtacaccgcctgggtttacagtcgcagctgaaagcactgatctctgacaccaaaattccgtatgccaccctgtcctggggcaaatctctgattgacgaaaatggtgagcgttgggctggcgtctacgttggtgaagcatcccaaccagtagttaaggatgcggtggaaaacgcagaatgtcttatcaagctaggtgtgaactacacggatacaactactgctggtttcacccagaacattgagcgcagccgtgtcgttgacatccatcaggaacgtgctaccgttggggataaatttttcgctccgatcgccatgaaggacgcactccaagctctgcacgaagtcctgactagcggtatcgaaatcaaaccgaaacccttaatcgataaagttgggaaacatcagcagcagggcggtgatgacgagccgctgctgcaaaaagacttgtggcacattatcgcgggctccctggatgactcgaacattgtgttcgcggatcagggtacgtcatacttcggcatgagtgaagtacgtctgccggaaggtgtaaccttttacggccagccgctgtggggctcaatcggatacaccctgccagcatctctgggcgcggggctggcaagcccgaataaacgctctgtcctgcttatcggcgatggtagcgctttactcactattcaggatctcgccgttatgctccgcgaaaaactgaaccctgtgattctcctgatcaacaactctggctataccgttgagcgggccatccacggggagaaacaaccctataatgacattccaatgtgcgattggcagctgatgccgaaggctttcggtgccaacgaaggaaactgcgtgaccctgaaagttaacacccctgtcgagctgaaaagtgctctggaacaggctaaaaacactccggacaaaatggttttcatcgaagttgtaaccgaagtcatggacataccgtctctgctgaagcaggttgcagcagcgctgcaa

SEQ ID NO: 525 - DNA, 1671 bp, Artificial Sequence
  Synthetic polynucleotide
atgtcgaagacgctcaattctaacatctatagcgtcagtgattaccttctggaccgcctgagccaagcgggtattcagcatgtattcggcgtgccaggggactacaatctgcgatttttagatttcgttaccgctcacccccagctggaatgggttggttgcgccaacgagttgaacgctgcatatgcggcagacggctacgctcgttgtgcccctgctgccgcgctggtaactacctttggagttggtgaactgtccgctatcaacggcactgctggctcctacgcagaatatctgccggtgatacacatcgttggtgcgccgaaccgtcgctctcagcaaaaaggtgaactactgcaccataccctgggcgatggcgactacggccacttctaccgtatggctgcggaggtcacttgctctcaggctgtactgaccccggaaaacgcagcactggagattgatcgtgttttaagcgatgtgctctatcatcggagaccgggttacatcctgctgcctagcgacgtgtgtgacgaaccgatccgtacagaattgtacccgttcgccgcccgtcaggacgaagtaactggtctgtcagaatttattcaggccgcacgcgaactgctaaaaccggctcgtaaagtagcgctgctggcggattttctagctgatcgcttcggccagaagcaacaggttcagcaactgtctgacctgcaaggtgttgcttctgcgactctgctgatgggcaaaggtgtcttagacgagtcccgccccaatttcatcggtacctatgctgggggtgcaagtcagccgaaagttaaagctgctatggaaaacgcggacgtgctgattagcgtcggtgttcgtctgacggattcagttacagcaggcttcacccaccagatcgctgcggacaaaactatcgatctgcaaccattctccgcatctgtcgctgggcaggtattttctcagcttccgatgggcgacgccctcgcggctcttactgagctggcaaaggaattaagcgtagaatggcaggcccctgaatcgctgcgcgattgcctgccggagagccacggcaataaactggatcagccagccttctggcagcagatgcaaaggttcctgcgtccggatgacattgtggttgcggagcagggcaccgcatcatttggttccgccacgttgcgtctgccgaaaggggtgaccttcatcgtgcagccactgtggggaagtataggttacaccctgccggcaatcctgggcgcacagttggctcagcctcatcgccgtgttgttttaatcatcggtgatggttctgctcagcttactattcaggaactcggcaccttactgcgtcatggattaaaaccggtaattatcttgctgaacaacgatggatacactgtcgaaagggcgattcacggtccggaagaatcttataacgatatcgcggcttggaactggacgaaaatcccttccgcactgagcgttaacggcgacttctccacttacaaggctgactcggtaccagcgcttgaaaaagttttgtcagaggttaacgtgcctaaggctctgactctgattgaagtgatgctgccgaaaatggacgttccggagtacctggctaaactgagcaaagcaatcgctgaacgtaacgcggcccacgaa

SEQ ID NO: 526 - DNA, 1680 bp, Artificial Sequence
  Synthetic polynucleotide
atgccaagcatccagattggtcaacacttgctgaatcgcttaaaggaaatcaacatagacgtggttttcggcgtacccggggattttaacatgccgctcctggacattatcgaggatgatcctaaactgacatggggtaacaacgcgaatgaactgaacgcctcttatgcagctgacggctacgctcgaatccgtggtgcaggcgctgttgtcactaccttcggcgttggtgaactgtccgcggtaaacggtgtggcaggttcatacgctgagatgctgccggtgatccatattgttgggacgccgtcgaccaaatctcaggccgcgggcgcaatgctgcaccatagcttaggcgatggaaactttgacgtattcttcaatatgtccagtatgatcgcctgcgcttcgacccacctgaaaaagcagactgctattgctgaaattgaccgggttatcagtcaagcggtactgagcaaacgtactggttatatcggcatcccgatcgatctcataaaaaccgaagtggaaatccctgaggaactgtctccgcttcagactaccctgccaaaaaacaacccggaagttcaggcaattgctctgaaagttgtcacagaagctattcagtccgcgaagcatccggtcattatcgtcgatggttgtgtgctgcgccaccgttgccagaaaccggttcaagagttcatcactcgctccggctttccgacttacgttgcgcctatgggtaaaggtgcagttgacgaatctatcgagaatttccgtggctgctactccggtaacgtaaccctcgaagccgtcaacgaagagatcaaactggcagatcttattatcgaaatcggtagcatcaagagcgacttcaacaccggcaatttctcgtattctttggaccgctctaaaacgattacgctacacagctttgctactatcgttttctgtgctgaataccagaaggtttctatgatggaatttattccccttctgacccaggccctgccacaacagccacgtatgttcaacctgggcccgcgtgcgaaaccggttccgatccagccgggcactgaaattactcacaactacttctggcataaagtgccggaatatatggaagagaacgcaatcgtatgcgcggaaaccggtacggctgagtttgcttctctgaacatggatggcccgaagggaaccacttacataactcaaatcctgtgggggagcatcgggttcaccgtaggtgcaagcgtgggcgcggccattgctgcccgtgacaggcgcgtatacctgtttgttggtgatggctcatttcagctcacttgccaggaaattgctgtcttcctgcgtcatggtctgacacctgtaatctttctgttaaataacgatggttacctgatcgagaaactgatccacggtccggaccgtgcctataacaactatcagatgtggaattaccacaaaacacttgattacttcggcgctcacctggaacacaacaaatcgatgggggttccgccagtgggctttgaaggaaaggttgcaacccgcgatgagttcgaatccgctatgaaacaggttcaggcgaacccgaataaaattcattttctggaggtaatcatgccgcagttcgacgcaccgagagaattagaactgctggtagcgaactccgaaaaccgc

SEQ ID NO: 527 - DNA, 1650 bp, Artificial Sequence
  Synthetic polynucleotide
atgaagacgctgaacgttggtgagtacttgctgcatcgcttacaccaatcgggcatccgacacctcttcggagtgccaggtgactataatctgcaatttctggatagcgtaattgctcatcctgaaatcgcctgggtcggctgcgcaaacgaacttaacgctgcgtacgcagctgatggttatgggcgttgtaatggcgccgcggctctgctgactaccttcggtgttggcgaactaagtgcaattaacggtatcgccggctcttacgctgagtacgtaccggtgatccacatcgtcggcgcgccggcgtccaaagttcagcagcagggagactgcgttcaccattctctgggtgacggtgattttggccacttcctccgtatggctcaggaagtgagcgcggcaagcgctgttctgacagcagacaacgccgttgctgaaattgatcgtgtgatagatgaagcgctgcaacagcaccgccccggctatctgctgctggcagtagacgtagctgcggctgaggttaccatgccggcagttaaatctgatgcacagccgtcccatcatcagatcgctgcggcttttgccgacgctgctgaacggctcctggcacctgcgcagcgtgtggccttactggcggacttcctggcgtctcgttggcagctgcaaccacagctggagactctgcgccagttgagggctattccggcggctactcttctcatgggtaaaggggtcctaaacgaacagcagccaggttacgtcggcacctatgcagctgaaggctcatccgacgctgtacgccaagcaatcgaagataccgatgtgactctgtgcgtaggcgtgcgtttcaccgataccttgacggcgggtttcactcagaacctgccggaagctcgcgttattgacctgcaaccgtttcaggctactgttggtggtgaggttttcgccccgctgagcatggaacaggccctggacgccctgcttccgatctaccagcgtcactgcgcacactggcaactggcagctgaaatagaatgtgaggaaaatgaacagattgacgcggcagtgatctcgcaacacgcattttggcaggctatgcagcgtttcctgcaaccaggcgatatcatcctggctgatcaggggacagcggccttcggcgcggctgctctgcgcttgccgcaggacgcgcagctgctggtccagccgctgtgggggtccatcggttacaccctgccggcaaccttcggagctcagactgctcagccagatcgtcgtgttatcctgattattggtgacggttctgctcaactgacaatccaggaacttggtagcatgcagcgagatggtcagcagcctatcatttttctgctgaacaacgacggctacaccgtggagcgtgccatccacggcgcagaacaaagatataatgacattgcccagtggaactggactgctttgccgcaagcgatgagtctgcaatgtgctgcgcagtcttggcgcatctccgagactgtccagttagatgcagtaatggcacagttaatgcgtaaccgtcgcttatcgctggttgaagttgtaatggataaacaggacctgccccctctgctgcgcaaggtaaccgctgccttacatcagcgtaactcaaga

SEQ ID NO: 528 - DNA, 1713 bp, Artificial Sequence
  Synthetic polynucleotide
atgtcggacagcgagcctcaaatggtagatctgggcgactatctatttgcacgtttcaagcagttgggggttgattccgtcttcggtgttccgggcgatttcaatttaacgctgctggaccatgtatacaacgtggacatgcgctgggttggtaacactaacgaacttaacgctggttactctgccgatggctattctcgtgtcaaacgactggcttgtctcgtgaccacctttggcgttggagaactgtcagcggtggctgcggttgcgggtagttacgcagaacacgtaggtgtggttcacgtagtcggcgttccgagcacatccgctgagaataaacatctgctgctccaccacactctgggtaacggcgacttccgcgtgttcgcacagatgtctaaactgatcagcgaatacactcatcacattgaagaccccagcgaggctgccgatgtaatcgacaccgcaattcgtatcgcttatacccaccagcggccggtttacatagcggtaccatctaacttttcggaagttgatatcgccgatcaggctcgtctggacactccgctggatctgtcattgcagccaaatgacccggaatcccaatacgaagtgattgaagagatctgctctcgtatcaaggcggcaaaaaaacctgttattctggtcgatgcttgcgcgagccgttaccgctgtgttgacgaaaccaaagagcttgccaaaatcactaactttgcatatttcgtcacgccaatgggtaagggatccgtagatgaagacactgatagatacggcgggacctacgtgggtagtctgactgctccggctacagccgaagtggtcgagacggccgacctgatcatttctgtgggcgcactgttaagtgacttcaacaccggtagcttttcttacagctattccaccaaaaacgttgttgaactgcattcggatcatgttaagatcaaatctgctacttataataacgtcggcatgaaaatgttattccccccgctgctggaagctgttaaaaaattggttgcggaaactccggattttgcatctaaagcgctggcagtgccggacactaccccgaaaatcccagaagtaccggatgatcacattacgacccaggcttggctgtggcaacgtttaagttacttcctgcgcccgacagacatcgttgtcaccgaaactggtacctccagcttcggcataatccagaccaagttcccgcacaacgtgcgcggcatttcccaggtactgtggggtagcatcggttattcagttggcgcagcttgcggtgcttctatcgctgctcaggagattgaccctcaacagcgtgtgattctgttcgttggcgatggttcgttacagctgaccgttacggaaatcagctgcatgatccgaaacaacgtcaagccgtacatctttgttcttaacaatgatgggtatactatcgaacgtctcattcacggtgaaaacgcctcgtacaacgatgtacacatgtggaaatatagtaaaattctggacacctttaacgctaaagcgcatgaatccatcgtcgtgaacactaagggtgagatggacgctctgttcgacaacgaagagttcgcaaaaccagacaagatccgtctgatcgaagtaatgtgcgataaaatggacgcgccggcgtctctgatcaaacaggctgagctctccgctaaaacaaacgta

SEQ ID NO: 529 - DNA, 1722 bp, Artificial Sequence
  Synthetic polynucleotide
atgaacacggcggagtatttggtgaagaaactggaagaattaggggtcaatgaatttttcggtctgcctggcgactacaacttcaacctgctgtacgcagttgaaaacaacccaaatacttgttggatcggttgcaccaacgagcttaacgccggctatgctgctgatggttacgctcgtatgcgaggctacggtgcactcattactacctatggcgttggtgaactgtcggcgatgaacgccatcgctggcagcctagcagaaaatgtaccggtgattagtatcgttggagtaccggcgacaaaaaccatcgaaaacaaaacctgcgtgcaccataactttcaggatgttgactaccacgcttgttacgaggcccataaacacgtcactgcggctgctgcattcttgactcgcgacaatgcgaagatggaaatagatcgggtactgaaaacctttgttaaagaacgtaaaccggtgtacatcgctgttccgctggacattgcgaaaatggaaatctctgataaggaagtctcttatgactggatttccgatgaggagacgctcagactggtttcaaacaaaatcgctgcaaaaatcaacaatgcgcaaaaaccggtcattctgggggacctgctggtgaaacgtttcgatagccgtattgaatacaaggaatttgtagaaaagactcgcatcccaactaccaacttccttatgggtacaaacctcatcgacatggattatgacctgtacctgggtggctactatgctggcttcgaaaaccctaccgcagaaaaatacgttaatgaaactgactgccttatcgcagtgggacccgtgtacactgatttaaacgcgttcggctttaacctgccgtataaaattaacaatcagatcgcgatttatggtactcacacctacgttgagggtgagaaatatgataacgtaaaaatgtctgatgttctggaagccgtaaccaaactggttgattccaaggacatgaaaatcttaaagccggctattgggtacgaacataaagctagctctcctgacgcgctgacgtccgaatatatctacccccgcctgcaagagttcatcaaagataacgacatcattgtggccgagaccggtattatcccgcacggcgtagcaccgatgaagtttccggcgactgctgaactgcaaacgcagacgctgtggggcagcatcggctgggcaacaccagccgctctgggtgtatgcctggcaaaaccgaaatctcgtgttatcctgattaccggtgaaggcagccatcagttgaccgccatggaaatcggtaacatgctccgccgtggtgtcaaacccatcgttattgtgctgaataacaaaggctacactatcgagcgcgttctgtcagagacgccaaaagattgcttcaacgatattatgcagatgaactattccaaattcgcgcgtgtctttgaaggcgacgtgtggagtaccaaggtctccactgccgacgatttcgacaaagctctgaaagttacccagattatgaacaaaatgtgctacatcgaaatctgtaccgaagctatggacatgccgaagctgactcaggatctgatagccaatctgaaatcaaaagcgccgaaaatcgaagctgtgaaaaaggaagagccggtgaagttggagaactctggtagcatggcattcgaaaccactgtccacaagggattcaccgaagaa

SEQ ID NO: 530 - DNA, 1644 bp, Artificial Sequence
  Synthetic polynucleotide
atggcaaagacggtaattcaacacgtcttgagtcgcctgtatgacctcggcatcagcgatatatttggggttccgggtgactacgccttcccaatcgaagatgctgtttgcgacgataatcgtttacgatggattggtaactgtaacgagctgaacgctgcgtactctgcggatggctatgctcgtatccatggtatggcagctctgtccaccactttcggcgtgggtgaactgtcagccatctctggcattgcaggagcctttgctgaatcgctgccgatcttccacctagtaggtatgcctgcgtccagcgttcaggcgcagggcggtctggtgcaccataccctgggtgacggtcacttcactaccttttacgaggctactgccccgttcgtctgcgcacgggctatcatgacacccgaaaactgcgttgcagaaactgaacgtctgattgcggctgccctacgctaccgcaaaccggtatatatggtgtttccgtctgactacgcgacgatgcctatcgtggagatggctgtaccagcgaccgttactgaaagctccgatccggttgtacttaccgaagttgttgacatcctcgcggatcgtctgaataactctcagcaggcttgcgtcttaccgggcatttacctggctcgtcacggcgtgcgccaggaaactctgagcctgatcgaagcagcaaacttgccgttcgctaccatgatgatggacaaatctgttctcgatgaaagtcattcgaactatatcgggatgtacaatggcaacctgatggatgctaacgttcgtgacttcgtcgagtccagcgactgtgtactgcgtattggtgctatcatgtctgacttcaacacgggtgcgtttaccgcccgtctggactcgcgcaaatgcatagccatcatgcccgagtctgttcagatcggtggcgcagtttacaatcgtgtcctgatgaaggatgtactggaggcagtggctaaaaaagtttcaaaaaaagcgtttccggcgcatgctcctaaggtgacagccctccctgtggtaactgctagcggcaaaattaccgctgaatatttatacagccgctggcaacagatgctgaagccaaacgatatcctgatggcagaaaccggtacgtcctcaatggggctgggcttcgctcgtatgccgcagggctccaccttccacaaccaaactctgtggggtgcaatcggttgggcgactccggcagcgttcggcgcagcgatggcagcgccggaacagcgaactgtgctgatcaccggagagggttctcaccaactgaccgctcaggaaatttcgcagttttatcgcttcggcctgaaaccactaatcttcgttctgaacaatgatggttacctgattgaaaggctgttgtgcaaagacggggatatttactacaacgacctggcgcagtggaaatatgaaaaactgccggaagcgatgggctgcgaaaactggttcacggctcgtgttactacctgtgaggaactggacgcagccatccgtcaggccgaaacctgcggcactggagcttacatcgaagttatcacagaaaagtacgctagctctgagcttgccgaaaaactgcaccagtctatcaactccttatatagcgcg

SEQ ID NO: 531 - DNA, 1659 bp, Artificial Sequence
  Synthetic polynucleotide
atgcgctactgcgtagctgattatctcgttgaccgtctgaatgagtgtggcattagacacctgtttggggtcccgggtgactacaacttggtgttccttgatcatgttatagcgcaccctgaattagcatgggttggttgcgccaacgaactgaacgctgcatatgctgcggatggctacgcccgttgcaagggtgctgctgccctgctgactacgttcggcgtaggagaactgtccgcactgaatggtgtcgcgggcagttacgcagagcacctgccagtgatccatatcgttggcgctcccaactcacacgcgcagcaacgcggtgaactgttacatcatacactgggtgacggcgactttcgtcacttcctgcgtatcgcggaagaggtaagcgttgctcaggcgaccctaactccggctaacgcttgtaccgaaatcgatcgcgtgattctggaagcacttaaacagcaacgaccgggctatctgctgctgccgtcggatgtagcggaagcacctgcgactcggccgaccaaacgtctggacgttgctgctgctgctgccgaaccggctactcttgaagcgttccgtcactgcgctcaggcaaaaatcgcagagtctcgttctgcaagcctcttggccgacttcttggcgctgcgctacgggctgcaagaggctctgcaacagtggatggacggtaccccaatgcctcacgcttccctgctgatgggtaaaggcctttttgatgaatctaagccgggattcctcggtacatattcaggcgccgcgagcgaaccgcaggtgaggcaggggattgaatctgctggcgtggttatctgtgtaggcgtccgttttaccgacactattacggcgggtttctcccagaaattgtctcagcagcagaccatcgatgttcagccgaacgccgttcgtgttggtgaacgctggtttagtggcatttcgatggcccaggcagtagatgttctgcaccaattatgcaaacgtcaggcaagcgcatggcccgcagcgactcagcgcccgtctgagctgcaaccaggtaatggcgacaaactggatcagcacgccctgtggcacaccctgcaaaacgccctgcaaccgggcgacatcgtgttggctgaccagggtaccgcagctttcggcgcggcggctctgactctgccggagggtgtgacgttcatcgctcagcccctgtggggcagcatagggtacactctgccagccgcatttggtgctcaaaccgcgcatcctaaccgccgtgtcttgctcctgatcggagatggttccgctcagttaactatccaggaactgggttctatgttacgtgacggccagaagccggtcgtcctgctgctgaacaatgatggttacaccgttgaacgggctattcacggtccggaacagaggtataacgatatcgcagcttgggattggacacgcctgccgcaagcgctgtccgtagacggccaggcagaatgctggcgtgttaccgagactgcgcagttagcagctgtgatggaaaaactggcaagcccggaacgcctggccttaatcgagatcatgttgccaaaacaggacatcccggaactgttgcgtgcggtcacatccagcctggggaagcgtaactctgaaatggaacac

SEQ ID NO: 532 - DNA, 1659 bp, Artificial Sequence
  Synthetic polynucleotide
atgtcgaagaactacactgttgcggactatctgttggatcgtctggcccagattgggatcaggcatttctttggcgtacccggtgactacaatctccaattccttgatcacgtgatcgctcaccagcagataacctgggtcggttgcgctaacgagttaaacgcagcttacgcagcggatggctatgcacgctgtaaaccagctgccgcactgctgacaacttttggtgttggcgaactgagcgctatcaacggtattgccggctcttacgcggaatacctgccggtgatccatgtagtcggcacgcctaccctgcgtgctcagcgagcgggagacctgctgcaccactctctcggtgacggagatttcggccacttctcccgtatggcaaaagaagttaccgtggctcaggctagtcttacagcgtcaaatgccgaagctgaaattgaccgtctgctgactaccgcgctgttcgagcatcgcccggtttatttgctgctaccgagcgacgtagcagaagcaccgctggcgtctcgtccggctccattaatgctgcgccaacccaacctgtccgaggcttcgctccagggttttatcgctgctgcccgcgaaaaattacaggcagcgcagcgtgtgagccttctggccgattttctggcggagcgtttcggtgctgaaaaagcactggaacaatggatgaacgaggttaatatcccgcattctactctgctcctgggcaaatccgtccttgacgaaacccacgcgtgcttcactggcacgtacgccggtgctgcatccgatccgcaggttaagcaactgatcgaaggagcagatgttgttattaacgtaggtgtgcggttcacggataccatcactgccggtttcagccaccagttgccgtacgaaaaatgcattgacctacagccattcgaagctcgcgttgggcagcaagttttttctcagatccctatgcacgacgcaattaaagctctgcatcagctgaccctgagtctggctccgctttggcagctgccggctattacccgtccttctctgccggaaccgaacggcagcggtttagaccagcacgcgttttggcaacagatgcaaaacttcctgcaaccaggcgatatcctgatcgccgaacagggcacctcctgttttggcgcggcggcactgaacctgccgcgcggttgccggtttattgtacagtctctgtggggtagcatcgggtatactctgccggcagcgttcggcgtacagactgctgagccggagcgtcgcgtgttgctcctgatcggtgatggtgccgctcaactgacggttcaagaactgggctcgatgctccgtgacgggcagaagcccgttgtcttccttctgaataacaacggctatacagttgaaagagcaatccacggccctgaacagaggtacaatgatatcgcccagtggaactggacccagctaccgcaggccctggctctggaaccacaggtcaaatgtctgcgtgtgagtgagccggaacaactgtgccaggcactggacaaagtgaacgatcgcgaatatctgctgtttatcgaggttatgttgccgcagatggatatcccggaactgcttgacacgatttctcgtgcgatacaggctcgtaacatggcagcg

SEQ ID NO: 533 - protein, 548 aa, Lactococcus lactis; identical to SEQ ID NO: 29

SEQ ID NO: 534 - protein, 546 aa, Staphylococcus agnetis
MKKKISQFIFDEIERHGVDTIFGVPGDFNLAFLDDIVAHPKLEWVGNTNELNAAYAADGYARLKGLSAMVTTFGVGELSAVNGIAGSYAERVPVIAITGGPTTVVEKAGKYVHHSLGEGVFDVYQKMYQHITVAQTYVTPENALTEIPRVIQAALDEKRPVHIHLPIDTAMVEIDVPDTEQPSKEEEITATEWLTVLEHKLQQAKQPTLIVGHEINSFRLQHEVKALVDQLGLPVAQLSLGKSAFDETHPNYMGIYDGSIAHPAIKDYVDHSDLVITLGAKLTDSATAGFSYQFADEQIVTLNHKNIQVDEVTVESMALPEIVSQMSKLNSHFDGEWPQCERPSNSEVVVDDAPLTQQHYFELMQQFIKPNDVLIAEQGTSFFGAYDLVLPQGVTFIGQPLWGSIGYTFPATLGTQLADRHRRNILLIGDGSLQLTVQDMATMLRQNIHPIIFIINNDGYTVERKIHGENEPYNDISKWDYHLLPTVFGHKETPTYQVSTSKALKEVMDKVNEQPQSMHVIEVFMDKHDAPEKLTNIAKAFATQNK

SEQ ID NO: 535 - protein, 547 aa, Unknown
  Mesorhizobium sp. SOD10
MTLTVIQHVLERLKAIGISDVFGVPGDYAFPVNDAICNDPAMRWIGCANELNAAYAADGYARIKGMAALCTTYGVGELSAINGIAGAYAEHLPIFHLVGAPGMAVQTSRRAMHHTLGNGEYDLFHRMSEPVVCAHAVMTPQNVAYETERLIAEALFHRRPVYMVFPADYANQPVLGSAEPIRAPGSNAEALEAAVAAIVAALDKAETACVLPGILIARSGLKAAMQAVIDKSGLPFATMFMDKSVLDEQQAGFVGMYDGAIMSEEVRGFVEGSDQVLAIGTLASDFNTGAFTARLDPARTISIGHHHVHVGGKTYANIELGDVLEALSRKLTKRNWKRIPAVSLGVKSGKGNDPITVEALYPRWAEFLKPEDIVIGETGTASMGLGFALIPKGATFHNQTLWGSIGWATPAAVGAAAAAPDRRVVLVTGDGSHQLTAQEIGQFGRLGLKPVVFVLNNDGYLIERLLCKDPEIAYNDIAPWRYTELPHALGCDGWFTARVTTCAEFDEALEQAGKADSGVYIEVVTDAYAASPLAMKLHESMASLYKA

SEQ ID NO: 536 - protein, 550 aa, Pantoea stewartii
MSSYTVGDYLLARLQACGIRHLFGVPGDFNLQFLDRVIAHPTISWVGCANELNAAYAADGYGRCSGMAALLTTFGVGELSAINGLAGSFAEYVPVIHIVGAPSSQAMQQGDCVHHTLGDGDFGHFIRMAKEVNVATAQLTAENATAEIDRVLSSVIQQHRPGYLLLPVDVAQAETAAPVHPLVSSASSPESLRSAFRQAAERLLAPAQRVSLLADFLAQRWQQQPALAALRARRAFPCATLLMGKGVLDEQQPGFVGTYAGEGSEGRVRQQIEEADVTLCVGVRFTDTITAGFTQQFRPDRLIDVQPHSASVAGQTFAPLSMADALQTLLPLFERYGAGWQSAGPVKPAAPVPDAAIISQSAFWQAMQSFIQPGDIILADQGTAAFGAAALRLPAGAQLLVQPLWGSIGYTLPAAFGAQTARPSQRVILIIGDGSAQLTIQELGSMLRDDQHPIIFLLNNEGYTVERAIHGADQRYNDIAQWNWTALPQAFSLHCQAQSWRISETVQLTALMAQLTQQHRLSFIEVVMQKDDLPPLLRKVSACLSQRNGG

SEQ ID NO: 537 - protein, 550 aa, Unknown
  Desulfovibrio sp. TomC
MQQTVIELLIARLKEIGITDVFGVPGDFAFALNDAIDNDPDMRWIGCTNELNAAYAADGYARIKGRAALCTTYGVGELSALCGVAGSYTEHLPVFHLVGMPSISTQQSRRIVHHTLGDGLFDAFSTMTKPVVCASAILTAENAACQIERCIEAAIARNRPVYMALPQDQADKPLPGQYVCAPEAPVSNPPVLAAAIEAIVEKITAAGSTVVLAGYLIARLGLRSAAHELLTRTGLPYATMFMDKTALDETHPSYIGLYDGRIMNPEVRDFVEGCDCVLNLGAQWSDFNTGAFTAHIDPSRMIAVMQHEVRVGHAVFAHVEMRDVLAGLARVLPHKPASGPRAKGLGQPKGAPGDPITPDYLYPRWEQFLRPGDVVMAETGTVSMGLGFALMPQGAEFFNQTLWGAIGWATPASFGAALAAPERRTLLFTGEGSHQMTAQELGQFGMHGLKPIVFCLNNDGYLIERLLCKNPLSSYNDLAPWNYAQLPAAFGLTDWYCAKVTTNAELEQALAKAETCGTGAYIEVVMDRMAASPLAQKLGESIKTLYASAK

SEQ ID NO: 538 - protein, 547 aa, Staphylococcus petrasii
MRRRIGQYLMDCLSNVGVDKVFGVPGDFNLTFLDDIIGRTDMEWIGNTNELNASYAADGYARMKGISAMVTTFGVGELSAVNGIAGAFAERVPVIQITGAPTQAVEQAGKYVHHSLGEGNFDDYRKMYEPITTTQAYITEDNAQLEIPRVINAALTESRPVHIHLPIDVAAKEIEVKEDYHYKMSKPADVSQYIDMVQAKLNSAERPVIITGHEINSFGLHELLEQFVNQTGIPVAQLSLGKGAFNEESPYYMGIYDGSIAEERIKYYVDHSDAILNIGAKLTDSATAGFSYQFDIDDVIMLNHRNFKMNETRDDNVALQDLLIGLQRIDFHFNGDYPMFKKPVPNDDVLDDTPLTQQTYFKMMQDFLNRDDVVIAEQGTSFFGAYDLALTKTNKFIGQPLWGSIGYTLPATLGSQLADGERRNVLLIGDGSLQLTVQEMATMIRLQLKPVIFIINNDGYTVERKIHGENALYNDIPMWDYKALPSVFGGNETVSVHEVDSSVSLQHAFNEINLQPNRMHVIEVKMGMHDAPEKLNDIGKAFAKQNG

SEQ ID NO: 539 - protein, 587 aa, Cladophialophora immunda
MAAPTICMGQYLFRRIKQLGTEHILGVPGDFNLTLLDEIYNVSGLKWIGCCNELNGAYAADGYTRIKGSPAVLVTTYAVGELSAMNGVAGAYAEHAGMIHIVGMPARSMQKARAMLHHTMKANMDHATYIHMAAPIRETHAYLMDDKIMAEEIDRTIVACVRSRLPVYIYVPVDAVQVQLDAKRLETPLDVGVHNGDGKIEDQIVSSILSLIEKASDPVILADVLTVRHGGRELARELAELTQFASYSTPLSKGVIDETLPYYNGLYNGKVSFPGVAEAIEHSDLVLNLGPLLSDSNTGGFTREIKDDYLVLLGHDSCQVKDQKFYGVHFLPILKKLVTELKANPQKYNLPRPQKAPRTETPVLNDLKSGEIKQSYVWQRLGRFLRKDDILLVESGTAQFGMPDATFPPNVKLITQTFWSSIGFTVGACFGALIAAKELKYAGRVVLIVGEGSLQMTVQEIGSYIRYGFKPIIFVINNNGYAIERAIHGPEQGYNDVSMMWDYQKMLGFFGAREDTGVKAKSRATKTVEELEAVLKDDDFASGNSIQLCEIFMDTFDYPWRLTEQIAISRARTKRDADKLTAASGEA

SEQ ID NO: 540 - protein, 595 aa, Fonsecaea pedrosoi
MPSTVKLAEYLFTRLHQLGVRSIHGVPGDYNLTLLDHIEPSGLHWVGNCNELNAGYAADGYARINGLGALITTFGVGELSAVNAIAGAYCERSAVVHVVGTPERSVQDSRLKVHHTFADGNFDRFAQMHAQITVAQASLWDPLMAPEQIDAVLRQCLLQSRPVYIQVPVDLVDAPVEADRLYSQCLSAAVTSMNSTITPAHDTVLSLVLKKIKTAKHPAILVDGESRALGITEDVQHIVRLTKWPTWVTVFGKGLVDETAPNVHGVYRGSYDPKAKAFVDSSDLVLCFGPHFSTTNTFDSTSIPPQAVTISYTDNEVRIGAQIFRDVRARAAVSGLREELSALAPTLPAVPGPELPEKHPMVCHSLLPSKQKVTQDRLWRVLANSIRPGDIVLGETGTAGYGVQEMSLPQDTRVFAPVTWLSIGYMLPAAQGAALAQRDLLLSAPSRSNGDTKPARPRTVLFIGDGSFQMTVQELSTIIRERLDVVIFLLNNDGYTIERCIHGLRKSYNDVAPWRYLQAPSFLGAEADDDDDDDVFTATVRDWGDLQRVLASKEMTSGKGLRMVEIVLDREDVLEGPLLDLLQEERKVALGGASQ

SEQ ID NO: 541 - protein, 554 aa, Bacillus filamentosus
MKKDYTIGDYLLDRLAQIGVQHVFGVPGDYNLMFLDEVLKHKELEWIGNCNELNAAYAADGYARLNGIGAVMTTFGVGELSAVNGIAGSYAEHVPVVKVTGAPTTKVMKEGAYVHHTLGDGNFHRFSTMFREVTCAQTILTVENASQEIDRVLLACLTEKKPVHIVLPIDVYNKPANKPKKQLLDEEMKSNEKAMDEMLTNLLMKINKAKKPVILADYEVYRYKAEKELMHFAEKSGFPLATLSMGKGVFDETHPQFIGVYNGDLSDSYIKQRIDESDCIISVGVKLTDSITGGFSQGFSEENVIHLHPLSVEGEGEKYAPLTMKDTLNTLAHHVKKREREEMDIISTTSRQQQPFEATDEKLTQTRFFERLSYFIKEDDVLLADQGTSFFGAATMPLKKGGTFIGQPLWGSIGYTLPAVLGSQLADKERRNILLIGDGSFQLTAQELSTIIYQKIKPIIFLINNDGYTVERAIHGENKSYNDIVMWDYEKLPSIFGPKEASETFKVQTEQELDDMLNKIEHHDKLVFAEIKMNRDDKPELLTELSKRFSSQNS

SEQ ID NO: 542 - protein, 560 aa, Mycobacterium heckeshornense
MNGTEHCAYTVGDYLLDRLTELGVSEIFGVPGDYNLEFLDHIVAHPGLRWVGNANELNAGYAADGYGRLRGMSAVVTTFGVGELSAANAIAGSYAEHVPVVHIVGGPSKDAQGTRRALHHSLGDGDFEHFLRISREITCAQTTLMPATATREIDRVLSEVREQKQPGYILMATDVARFPAEPPEAPLPRYTGGTSPRALSLFIDAATKLIGDHQVTVLADYLVHRLDAIPQLEALLSADAVPHATLMWGKSLVDESNPNFLGIYVGAASAEPVRRAVEEAPVLVTAGVVFTDMVSSFFSQRIDPARTIDVGVDQSTVAGQVFAPLEMGTALEALATIIAERGITSPPVTPASGGAPLQSPPRDQPLTQKILWDRLAAALTPGNVVVADQGTSFYGMACHRLPRGVTFIGQPLWGSIGYTLPAALGAGLAHRDRRPVLLIGDGAAQLTAQDLGVFSREGLAPVIVLVNNDGYTIERAIHGKNASYNDIVSWRWAEVPRALGVTNALTFRAQTCGELDDAFTAAARHQDRMVFIEAVVPRLDVPDLLAELARPTSPDGSARR

SEQ ID NO: 543 - protein, 547 aa, Helicobacter ailurogastricus
MTVSIGQYLLDRLKDYGVGHIFGVPGDYNLGFLDMIEDDPNLEWIGNCNELNASYAADGYARIKPMGALLTTFGVGELSAINGVAGSFAESVPVVKIVGMPSRNVSENRRFVHHTLGDGEFMRFYAMYQGISAAQTILNKQNAKSEIDRVLAECALHKKPVYIGIPADVPHMQIEVSSPMLYKPKSDKKILNAFIEAVKKTLKTYKSFIAMADYEVNRYHLNQELHDFIEATNLPIASLSMGKGVFSEQHPNFIGVYNGILSDDRVTNAIKESDCTILVGVKLTDSLTAGFHYICEEPTPKIEVHPLYSKIGEKVYSDILMQDVLKKLSHLNFKSKMPSKEPKEKPKLTGKLTQRQFFQVVEKHLQPNGVLIAEQGTSFFGAIDVSLPQGTSFIGQPLWGSIGYTFGALLGSALADRKRRNVLLVGDGSFQLTAQELSTMLRENITPIVLVINNDGYTVERCIHGPERKYNDINMWHYTKLLEAFDVHLHRKPLSFKAGTVESLEQALEQANKHPDKLAFIEVQMDRDDAPALLKKLGGLFSAQNSY

SEQ ID NO: 544 - protein, 562 aa, Candida auris; identical to SEQ ID NO: 14

SEQ ID NO: 545 - protein, 551 aa, Erwinia iniecta; identical to SEQ ID NO: 18

SEQ ID NO: 546 - protein, 566 aa, Bacillus sp. FJAT-18017; identical to SEQ ID NO: 16

SEQ ID NO: 547 - protein, 547 aa, Staphylococcus schleiferi
MKKRVGQFLFDEIAKHGVDKIFGVPGDFNLAFLDDIESHETLQWVGNTNELNASYAADGYARINGLAAMVTTFGVGELSATNGIAGSYAENVPVIAITGGPTTVVEKAKKYVHHSLGTGIFDAYRKMFAHITEAQTYLTTDNALTEVPRIIQVAIEEKRPVHVHLPIDTAMKEIEVPDQIEYPEVKASEDLSSIIEKVTEALQNAKQPTLIVGHQINSFGLQAQVQQLAERLNLPVAQLSLGKGAFNEESPQYMGIFDGSIADEAIRDYVNGSDVVITLGAKLTDSATAGFSQEFKDDIVKILNHRQVRIGEFESTSPALPEIVEALGQIDYHYEGQFPQFVWPQAENVDLNEEPLTQENYFKLMQGFLKKGDVVLAEQGTSFFGSYSLGIEGSTTFIGQPLWGSIGYTLPSTLGTTLAAPERRNILLIGDGSLQLTVQEISTMIREKMNPIIFVINNDGYTVERKIHGEKAHYNDIQMWDYKMLPAVFGGQDIPTYDVKSTKALKETMDAIEQNPNTMHFVEVHMDVMDAPEKLNIISKAFANQNK

SEQ ID NO: 548 - protein, 552 aa, Serratia sp. Leaf51
MDNIYTVGDYLLDRLSFSGISELFGVPGDYNLKFLDSVISHQQITWIGCTNELNAAYGADGYARTKGIAALLTTFGVGELSALNGIAGSYAEYVPVIHIVGAPPLSAQRKGELLHHTLGDGDFSHFMRMSQPVSVAQASLTPENALAEIDRVIEDVIYSSRPGYLLLPSDVAALPVSTRAHAIPARQPAFSASSLEAFVAAADARLRSAGRVSLLADFLAERFGVKAALEQWMEEVPLAHSTLLMGKGLFNEQQPNFAGTYSGAASAASTKEAIEGADVVISIGVKFTDTITAGFTQQLPAEKCIDLQPFSARVGNQIFHQLPLEKTVSVLHRLTAERADQWPPYAVKRTTLPQPADDSLDQYAFWQQIQAFLQPGDVLVAEQGTACFGAAALNLPQDCQFVVQPLWGSIGFTLPAAFGVQIAAPDRRVVLLIGDGSAQLTLQGLGAAIRYGLPPVIFVINNQGYTVERAIHGETQRYNDIAQWNWTQFPAAFGGKEVFSARADSPQALKEAIEQASAKRRMAWIEVILPKMDIPALLDSVTRSLAKRNSGE

SEQ ID NO: 549 - protein, 552 aa, Yersinia frederiksenii
MTSHYTVADYLLDRLAEIGIRHLFGVPGDFNLHFLDHVISHPVIKWVGCANELNAAYAADGYARVMPAAALLTTSGVGELSAINGIAGSFTEYLPVIHIVGTPTLRSQKNGELLHHSLGDGNFSHFSHMAKEVTCAQANLTADNAAYEIDRVLGAALSQRRPVYLSLPSDVAQTDIAIYQGTLALPQPVLSPTALQAFINAAREKLQSAHRVALLADFLADRFDMQLSLNRWLAEVNLPHSTLLLGKGVLDETHPLFIGTYAGAASEPHVKECIENADVLITVGVCFADIITAGFSQNINQDNCISIQPEQARIGRTCFSQIPMRAAIEALHELCKTLQDEWQQPVITRPERAEPKSDVLDQQAFWYHIQQFLRPNDLVLTDLGTSCFGAGTLNLPSGCTYMSQALWESIGFSLPAAYGAQLAQPQRRLILLVGDGAAQLTIQELGSMLRDGLNPIIFLLNNQGYTVERAIHGPQQRYNDIATWNWTQLPLALGLGKESFTHRVTKVQQLQQVLAQIEKPQKLTFIEVVLPPMDIPELLMHVTKSIQRRNVA

SEQ ID NO: 550 - protein, 548 aa, Yersinia aldovae
MTKTVVQHVLSRLYDLGISDIFGVPGDFAFPIQDAVCEDSRLRWIGNCNELNAAYAADGYARIRGMAALNTTFAVGELSALNGVAGAFAESLPVFHLVGMPSSTVQASGVIVHHTLGDGNFTAFYEATKHFVCAHAIMTPENCVAETERLIAAALRYRKPVYMGFPSDYAEMPIIESDVPQATAAQSNPAALSLAVEAIAERINRSQKTCILPGISIARHNLRQEALELVNSTNLPFATMFMDKSVLDESHPNYVGIYNGHLLNDDVSEFVEGCDCILKIGAMLSDFNTGAFTADFSRADTLNIEPEFVQIGETRYNNVMMRDVLTSLVGKVVRRTETTSMPHATAIPLVSETGKITADYLYSRWQEMLKPDDILVAETGTVSMGMGFALLPQGATFHNQTLWGSIGWATPAALGAAIAAPEKRTVLVTGEGSHQLTAQEISQFHRYGLKPTIIVLNNDGYLIERLLCKDSDIYYNDLAQWKYSKLPEAMGCEGWFSIRVTTCEELNDAIEYAETCDCGVYIEVVTEKYVTSALAAKLHDSIDTLYSM

SEQ ID NO: 551 - protein, 563 aa, Mycobacterium europaeum
MLVTDAASQPVYTVGDYLLDRLAELGVTEIFGVPGDYNLEFLDHIVAHPSIRWVGSSNELNAGYAADGYGRLRGMSAVVTTFGVGELSAANAIAGSYAEQVPVVHIVGGPSKDAQGTRRALHHSLGDGDFEHFFRISREITCAQANLMPATARREIDRVLSEVREQKRPGYILLSTDVARFPTEPPGDPLPRYTGGTSPRALSLFVEAASALIGDHQLTVLADLLVHRLQVVKELEALLTADVVPYATLMWGKSLLDESSPHYLGIYAGSASAPAVRAAIEQAPVLVTAGVVFTDMVSGFFSQRIDPARTIDVGQYQSSVAGEVFAPLEMGAALEALATILTRRPVSSPAVASPPAEALPPPPPRDQPLTQEMLWDRLCTALTPGNVVLADQGTSFYGMADHRLPQGVTFIGQPLWGSIGYTLPAALGAGVAHPDRRTVLLIGDGAAQLTVQELGNFSREGLSPVIVVVNNDGYTVERAIHGETAPYNDIVNWRWTEIPGALGVADHLAFRVRTYGELDDALTAAAQHSDRMVLVEVVLPRLEIPPLLVELVQPMSPDGSVRR

SEQ ID NO: 552 - protein, 548 aa, Enterococcus rotai
MYTVADYLLDRLKELGIDEIFGVPGDYNLQFLDHVTAREDLEWIGNANELNAAYMADGYARTKGISAFVTTFGVGELSAVNGLAGSFAENVPVIEIVGSPTTAVQASKKLVHHTLGDGDFLRFEKMHEEVTAGIAHLTANNALTEIDRVLLIAITEKRPVYINLPIDIATITVSKPQSKLNSQAEQLTAVEAAILTKVEQALQQAQCPVVIAGHEILSYHIEQQLDAFIQKFNLPITTLPLGKSAFNEDDAHYLGTYTGSTTDEPLKSRVDTADLVLLLGVKLTDSATSGFSFGFTDQQVISIGSTEVLFYGEQQEKVQLDRFVSALATLSFSRFTGEIIPVKRTENLVITDENLTQKQFWKMVEEFLISGDTIIGEQGTSFFGLTNVPLKKAVNFIGQPLWGSIGYTFPSALGSQLANKASRHLLFIGDGSLQLTVQELGTAIREKLAPIVFVINNNGYTVEREIHGATEQYNDIPMWDYQKLPFVFGGTEQTVATYKVFTELELDEVMKTARNDTERMQWIEVVMDQEDAPELLKKLGKIFAKQNA

SEQ ID NO: 553 - protein, 551 aa, Cosenzaea myxofaciens
MSNTVIKYLLNSLYDLGIHDIFGVAGDYAFPIEDTVCNSERMRWIGNCNELNAAYAADGYARVKGVAALSTTFGVGELSAINGIAGAYAENLPIFHLVGMPASGVQNSKRLVHHTLGNGDFDVFYELGQRLACAHTILTPDNCIEETARLINTALKERRPVYIGIPSDYALMPINSPQNTSVVSPVSSVSNKENLEKAISTIIKKITHSEKICVLPGILSSRFGVDEKVQTLIDKTGLPFATMFMDKSVLSESHPQYVGMYDGQLMTPQVRNFVENSEYIIGIGAILSDFNTGCFTAKINPEQFINIMPDYVEIGDEKFTSVHMDDVITRLIEALSYKIYSIPKAQSLNNNTQFHHEKITAEYLYPKLEAFFKPNDIIFSETGTCSMGLGFALLPENAKIHNQTLWGSIGWATPASFGAAIAAPESRIILVTGEGSHQLTVQEISQFIRFGLKPIILVLNNDGYLIERLLCDYPDAYYNDLAQWNYHQLPQAFGATDWYCQKVTSTNELDEALKIASSNTSACYIEIVTDKYESSELAQKLNEFKSALYSF

SEQ ID NO: 554 - protein, 548 aa, Staphylococcus pseudintermedius
MMKKRIGQFLIDEIAKQGVDKIFGVPGDFNLTFLDDIEAHETLEWVGNTNELNASYAADGYARLNGLAAMVTTFGVGELSAVNGIAGSYAENVPVIQITGAPTTVVEQAGKYVHHSLGNGKFDDYQKMYAQITETQTVLTVDNALTEIPRIIKVATEEKRPVHVHLPIDIAAKEIEVPDDVAYPATQKAENVSTVVEKLTERLKAAQQVTLIVGHQINSYGLQKDVQAIAEKLNLPVAQLSLGKGSFNEESAQYMGVYDGYIAEDNIRDYVDGSDLVITLGAKLTDSATAGFSQKFSNDTIVTLNHRDVKVGDYTTTEPSLPEIVEAFKNIDFKYGGDFPQYQWPDVSAAVYNDEPLTQENYFNLMQNFLRKGDVILGEQGTSFFGAYRLALQEGTTFIGQPLWGSIGYTLPSTLGTLLAAPERRHVLLIGDGSLQLTAQEMSTMVRQNLNPVIFIINNDGYTVEKKIHGENAKYNDIQMWDYKLLPALFGNKDIPTYDVKTSNDLKVAMDQIDQNPDTMHVVEVHMDVLDAPANLNEISKAFAAQNK

SEQ ID NO: 555 - protein, 552 aa, Buttiauxella brennerae
MSYCVADYLLDRLTEAGIRHLFGVPGDYNLQFLDNVIENPTLAWVGCANELNAAYAADGYARCHGAAALLTTFGVGELSAINGIAGSFAEYVPVIHIVGAPCIGAQRRGELMHHTLGDGDFGHFARMAQEVTVVQASLTAENACYEIDRVLIQVLSQRLPGYLLLPSDVSQAPATRPTKSLLSPPVSTDPTLLTEFRACAQARLAESRSVALLADFLAMRFGQQKTLQQWMDDTPMPHATLLMGKGLFDEGQQGFVGTYSAAASDASVIQAIEKAELVICVGVKFTDTLTAGFTQHFSLQQTIDIQPNATRIGERWFSGIVMEEAVSVLHQLCKRQVSGWPVPKQKPPALPEATNGELDQHAFWQLMQKFLQAGDIILADQGTAAFGAATLTLPAGVTFITQPLWGSIGFTLPAAFGAQTACPNRRVVLLVGDGSAQLTIQEIGSMLRDEQRPIIFLLNNDGYTVERAIHGAEQRYNDIAPWNWTQIPKALNIHNQAQCWRVTEQVQLEEVMQKVAKAERLTLVEVVLPKQDIPELLQAVTASLAKRNAAKD

SEQ ID NO: 556 - protein, 565 aa, Unknown
  Bacillus sp. FJAT-27225
MTSMNNNSKQTPIEQKSVGEYLFDCLKQEGITEIFGVPGDYNFTLLDTLQQYDGIQFYNGRNELNAGYAADGYARINGMSALITTFGVGELSACNAIAGANSEHVPIIHIVGAPPEKSQKDQKLMHHTLMDGNFDVFRKVYEPITAYTAVVTPNNARMEITAAIRVAKEKKKPVYLVIADDVVAKPVSVLDELESPLTTSNQDKLQEAADHVRRLLEPAGRPVILVDVKTVRFGLETAVRELANAMNVPVATMMYGKGAFDESNPNYIGMYAGTFGSSEVQSIVESSDCVIAIGPVWADTNTASFTAKLNPHNTIEIQPDMVKIGVSEYPDVQAADMLQEVQQIGYRSKAKPEKVSFPYEEITGSTDDPLKAASYFPRFQQMLKEDDIVIAETGIFYYGMSQVRLPRNTTYISQGGWQSIGYATPAAYGASIAAPERRVLLFTGDGSLQLTAQEISSMLYYGCKPMIFVLNNDGYTIEKYLNVKTEPDEQQYNNIPAWSYTKLAEAFGGNLFTKTVRTNGELEQAITEAEQECDEKLCLIEMIAADPMDAPEYMHQMRKFKQQQM

SEQ ID NO: 557 - protein, 546 aa, Staphylococcus aureus
MKQRIGAYLIDAIHRAGVDKIFGVPGDFNLAFLDDIISNPNVDWVGNTNELNASYAADGYARLNGLAALVTTFGVGELSAVNGIAGSYAERIPVIAITGAPTRAVEQAGKYVHHSLGEGTFDDYRKMFAHITVAQGYITPENATTEIPRLINTAIAERRPVHLHLPIDVAISEIEIPTPFEVTAAKDTDASTYIELLASKLYQSKQPIIITGHEINSFHLHQELEDFVNQTQIPVAQLSLGKGAFNEENPYYMGIYDGKIAEDKIRDYVDNSDLILNIGAKLTDSATAGFSYQFNIDDVVMLNHHNIKIDDVTNDEISLPSLLQQLTDISYTNNASFPAYHRPTSPDYTVGTELLTQQTYFKMMQNFLKPNDVIIADQGTSFFGAYDLALYKNNTFIGQPLWGSIGYTLPATLGSQLADKDRRNLLLIGDGSLQLTVQAISTMIRQHIKPVLFVINNDGYTVERLIHGMYEPYNDIHMWDYKALPAVFGGKNVEIHDVESSKDLQDTFNAINSHPDVMHFVEVKMSVEDAPKKLIDIAKAFSQQNK

SEQ ID NO: 558 - protein, 549 aa, Unknown
  Proteus
MTNTVIKYVLDRLYDLGIKDIFGVAGDYAFPIEDTVCNNQQQRWIGNCNELNAAYAADGYARIKGMAALSTTFGVGELSAINAIAGAYAENLPIFHLVGMPASGVQKSKRLVHHTLGNGDFDVFYQIAQRLACAHTILTPENCVEEMERVIDVALKERRPVYIGIPSDYANSQVVEPLSVTAPQKPTSDKATLEKAVSAIVEKLTHSNNVCVLPGFLSARLGLTDKIQHFIDKTGLPYATMFMDKSILSESNTQYVGMYDGQLMTPEVREFVESSEYILGIGTLLTDFNTGSFTANIKSEQFISIMPDYVEIDSVIYSCVYMTDILSELTQRLPNKTYHKITAKGLGEAVTSDNNKITAQYLYPRLEQFFKPNDIIIAETGTSSMGLGFALLPEGAQFHNQTLWGSIGWATPAALGAALAAPEKRIILITGEGSHQLTVQEISQFVRFGLKPIILVLNNDGYLIERLLCDYPEAYYNDLAQWNYHQLPQAFGATDWYSEKVTTASELDNALNKAALTDSASYIEIVTERYEASELAQKLKESKSSLYSF

SEQ ID NO: 559 - protein, 565 aa, Microbacterium pygmaeum
MTDERLEIPYTVADYLLDRLAEAGVRHLFGVPGDFTLAFLDHVQRHPLIEWVGCANELGAAYAADGYGRMHGLGALSTTFGVGELSAIGAIAGSYAEHVPVLHVVGAPTTATQAAGRATHHTLGDGDFGHFARMTAEVTVDQARLTAAGYSAEIDRVIVAARDRRLPGYLIVPADVSEAPAEPPRQALPQHPAITDPDVVDRFRQAVAARLAAARSVAVLADILVSRMSAEDSLRGLLRLGVPHATLLWGRRVVDESAEAYLGSYLGAASDGAVQTVIEDSDVLVMVGVQFTDLTSGFFSQRIDSARTIEIRGEYATVGGERFEPLAMSAALHAVTSAVREEAEHLQLIPTGAAHRPEDQPRVEVEDEPLGQAALWSEVTRFLRPGDTVLADQGTSFYGMAGHRLPHDVTFVGQPLWAAIGFTLPALLGAALARPDRRPVLLIGDGAAQLTIGELGTLLRHRIPAVIVIVDNAGYTVERAIHGLEEEYNDIARWDWTALVRAMDSEQTATGVRVATHEGLRDALDAARGSESLTLIQAVVPPLDVPPVLRALGAAAANANRPLDR

SEQ ID NO: 560 - protein, 549 aa, Morganella morganii
MTKTVVEHVLSRLQDLGIRHVFGVAGDFAFPIEDAVCESRTMQWMGNCNELNAAYAADGYARIKGAAALSTTFGVGELSAINGIAGSYAEHLPVFHLVGMPASGVQKSGRLVHHTLGDGNFSLFCELGQRLSCAHAVMTPENCVAETERLIAAALRERRPVYIGLPFDYATQPVQIPEHLTAPAQPVSDKTALTEAVAAIRAKLADSPSACILPGMLAARSGLIDDVQALIRQTGLPYATMFMDKAIISESDPHYAGMYNGQLMNPQIREFVENSDCVLGIGAVMTDFNTGSFTADIAPEKLISIMADHVRVGAATWQNVYMRDLLPALTAVLPHRECHIPAATGLGKPVADASGNITPQYLYPRFEQLFRKDDIIIAETGTVSMGLGFALLPEGAQFHNQTLWGSIGWATPAAVGAAIAAPDRRLILITGEGSHQLTAQEISQFGRFGLKPLIFVLNNDGYLIERLLCKDPEAVYNDLPQWRYAQLPQALGCDNWYCRRVTTSTELDEAIREAETGDRAAYIEIITERYAASDLAKKLGESVATLYSF

SEQ ID NO: 561 - protein, 557 aa, Unknown
  Mycobacterium sp. SWH-M5
MTDDGYTVGDYLLDRLAELGVTEIFGVPGDYQLEFLDHIVAHPRITWIGGANELNAGYAADAYGRLRGMAALVTTFGVGELSAANAIAGSYAEHVPVVHIVGAPSKDSQAARRIVHHTLGDGDFEHFLRMSREITCAQANLVPATATREIDRVLSEVREQKRPGYLLIATDVARFPTEPPHMPLPRYTDGTSPRARSLFTEAAAQLIGEHRLTVLADVLVHRMGCVEELGKLLAADTVPHATLMWGKTLVDESSPNFLGIYAGSASEGSVRDVIENAPVLVTAGVLFTDMVSGFFSQRIDPARTIDIGVNQSMVAGQVFAPLDMAAALDVLTAILTERGIESPALPPPAAPERHAPPARDAALTQHALWDRLSEALTPGNVVLADQGTSFYGLAGHRLASGVTFIGQPLWASIGYTLPAAVGAGLADRDRRTVLLIGDGAAQLTIQELGAFGREGLTPVVVVVNNDGYTVERAIHGVTAEYNDITGWRWTELPAALGVPDALTFRCRTYGELDDALTVAAETQDRMVFVEVMLERMDIPPLLSELAQSASAANAASG

SEQ ID NO: 562 - protein, 547 aa, Staphylococcus fleurettii
MKKRVGEYLMDALSTVGVEKVFGVPGDFNLAFLDDIVSRDDMEWVGNTNELNASYAADGYARMNGISAMVTTFGVGELSAVNGIAGSYAERVPVVAITGAPTTVVEEAGKYVHHSLGEGKFDNYRKMFKEITTAQGYITVENAQTEIPRLINAAIAEKRPVHLHLPIDVAQSEIDVVEAFKPAEAVKQDVSKYIEMIEQKLKTAKQPVIITGHEINSFKLHDKLEQFVQQTEIPVAQLSLGKGAFNEESPYYMGIYDGSIAEENIRNYVDNSDAILNIGAKLTDSATAGYSYGFDIDDVVMINHQDFKLNDTVASEFTLSNLVNGLLNIEYKNDANFPENIREEKGQYTPNNAPLTQETYFKMMQDFIGLDDIILAEQGTSFFGAYDLNLYKDNTFIGQPLWGSIGYTLPATIGTQMSNLYRRNILLIGDGSLQLTAQDISTMIREDLKPVIFVINNDGYTVERKIHGEHQPYNDIQMWDYKLLPVVFGGKDKVAIHDVETSADLENVFLQINNEPNQMHFIEVKMTASDAPEKLDAIGKAFSKQNS

SEQ ID NO: 563 - protein, 551 aa, Mycobacteroides abscessus
MTYTVSDYLLDRLNELGLRDLFGVPGDFNLQFLDHVIEHEGIVWVGNANELNAGYAADGYARVNGIGALVTTYGVGELSAINATAGSYAEQVPVLHIVGAPSKDAQAAHLTMHHTLGDGDFTHFIRMASEVSCTVADLEHATAVSEIDRVLREMMIHKRPGYILLATDVARVEVDPPAAPLNVPAKLSSPGARESFRKDLTTLLAGKKTTVLADLLVHRMGAQSNLTEMLDATGLPYATLMWGKTLVDESKPEFAGIYAGVVSNERTKKAVEDAEILICAGVTFTDTTTAGFSQNLPEHTVFLDAQTARLGRKTYAPLTLDTSLDIVREVALEVGALPQDLLPWEEEDHADIDMDAPLTQDVLWSLLSRELTPGNIVVADQGTSFFGMASRRFPERSMFIGQPLWGSIGYTLPAMMGAAIADRDARGVLLIGDGSAQLTIQELGTMLEQKINPVVVLINNDGYTVERAIHGATQPYNDIRTYNWQLLPAALGAREDEVLMLRVNTATELVDAARLTQQTRDRLVFMEIMMDKDDVPALLADVASALTRANS

SEQ ID NO: 564 - protein, 564 aa, Cyberlindnera fabianii
MSDITLGRYLFERLRQVEVQTIFGLPGDFNLSLLDKIYEVEGLRWAGNANELNSAYAADGYSRVKGISALVTTFGVGELSALNGIAGSYSEHVGVIHIVGVPSISSQAKQLLLHHTLGNGDFTVFHRMSSNISQTTAFIKDINSAPAEIDRCIRTAYVYQKPVYLAVPANLVDDVVSSNLLNTPIDLSLKANEEEAESEVIETVCQMVENAKNPVILVDACAARHNVKAETKELVDATQFPVFVTPMGKGVVDEQHPRFGGVYVGTLSKPDVKEAVESADLVLSVGALLSDFNTGSFSYSYKTKNIVEFHSDHIKIRNATFPGVQFKPVLQKLNKVIAASVKNYIPVPVPSLKLTNSPAGANTPLTQEWIWTKMSSWLREGDIVLTETGTSAFGIIQTRFPSNTTGISQVLWGSIGYSVGATLGAVAAAEELDKSRRVILFVGDGSLQLTVQEISTMIRWGLNPYIFVLNNDGYTIERLIHGERAQYNDIQSWDHLALLPTFGAKNYDAVRVSNTGEFNKICDDKEFAEPSKIRLIEVMLPTMDAPQNLVKQAQLTASTNSQQE

SEQ ID NO: 565 - protein, 551 aa, Leclercia adecarboxylata
MQTPYTVADYLLDRLTDCGADHLFGVPGDYNLQFLDHVIASPDIGWVGCANELNAAYAADGYARCKGFAALLTTFGVGELSAMNGIAGSFAEHVPVLHIVGAPGSASQKKGELLHHTLGDGEFRHFYKMSEPVTVAQAHLTEQNACYEIDRVLTEMLRERRPGYIMLPADVAKKPATPPVSALIDRLYESDSFRLDAFRQAAEKRLAASERTALLADFLVLRYGLQSQLQRWVEQTPMAHATLLMGKGIFDERKPGFAGTYSGSASAAGVNEAIEGADTVICVGTRFTDTLTAGFTHKLTQQQTIDVQPHASRIGDVWYTGIPMTQAIEVLSSLCHQYASATTATRPARQLHAVHPGTLSQDSFWQTLQTFIRPGDIILADQGTSAFGAGALRLPEDVNFIVQPIWGSIGYTLAAAYGAQTACPDRRVIAITGDGAAQLTIQELGSMLRDKQRPVIMVLNNEGYTVERAIHGPNQRYNDIALWNWTQIPQALSLDCQAECWRVSEAVQLEEVLEKVAHPERLSLIEVMLPKADVPPLLSGIIQALEARKSA

SEQ ID NO: 566 - protein, 549 aa, Clostridium thermobutyricum
MKTTVGNYLIDSLKEYGVKHIFGVPGDYNLSFLDQIDDSEDIEWIGNCNELNASYAADGYGRIKGMAAIATTFGVGELSAVNGIAGSYAENVPVVKIVGIPSSKVVENRKLVHHTLGDGEFYRFNEMFKEVSVAQTILNEINAKEEIDRVLRECYLYKKPVYIGMPVDLATKVINVSEKTSYNLESDKNSLNSFISNVKSLMSNSKKQMILADFEVNRYNLNKELQEFVEASNLPVSSLAMGKGVIDETHPNFVGVYSGSLSNENITKLVKSCDLAFLIGVKLTDSITAGFSYINKNITLVEVHPLYCRIGENLFSNILMKDALESLKNLNVEFSKNDTPHVSLINNFEATNTPLTQKRFFQGIESFLNENDILIAEQGTSFFGSCLVNMKKGCTFIGQPLWGSIGYTVGALLGTQIADRNRRNILLVGDGSFQLTAQEVSTMIRENLSPIIMVINNDGYTVERLIHGPNRKYNDINMWDYSKLVSVFDLEGNRSISFKAKTEIELMNALKEADNNKDKLTFIEVCMDKMDSPQLLKDLGELFSKQNSY

SEQ ID NO: 567 - protein, 573 aa, Penicillium steckii
MSSDTVKLGDYLFTRLLQLGVADIFGVPGDYNLRLLDYVVPAGLHWVGNCNELNAAYAADGYARIKGLSALVTTFGVGELSAANGIAGANAERAPVVHIVGTPPRPLQSTRALMHHTFADGEYRRFSAMAIHITAAQINLTDTTTAPERIDWIIQQALIHQRPVYLEIPDDMPDLFVSSANLKTPIRVPLVPSPPHEPKVVSRILDRLYSAQRPFILVDGESRSLGILDELDALIQKTNWPTWTTVFGKGLVNESLPNVYGLYAASFGDKPAQEYFETADLILTFGPHYSDTNSYFWTTVPKDAVAITFRDDTIQIESDTYRDISAGSVLTQVLQSLDATRTTKASGPSKVEVTTSDIKDTDIIAQNNFYRLVNPIFHENDIVLAETGTASYGGRSFKLPPNTRFFSAVTWLSIGYMLPATLGAALAKRGQNKVTGASSQAVLVIGDGSLQMTAQEISVMIKENLNILIIIINNEGYTIERVIHGRKQPYNDVPFWRHTQALSYFGANEEQIANSVFTARTCGELREVLKNERVHSGTGLRIVEVAMEREDVQGPLLYLLNKQIAEEQAATSN

SEQ ID NO: 568 - protein, 551 aa, Pantoea alhagi
MSGLTVSDYLLQRLNEIGIDHLFGVPGDFNLAFLDRVIAHPRLAWVGCANELNAAYAADGYARSRRAGALLTTFGVGELSAINGIAGSYAEYVPVIHIVGAPSLSAQQRGDLIHHSLGDGDFSHFLRMQREVTVAQATLTADNACVEIDRVMREALTQRRPGYLLLPVDVAGAPACSPGQPLTLQTQPDDQALQAFRCAAEALLSGARSVSLLADFLADRFGVQQQLAHWLETVPLPHATLLMGKGVLDEQRTGFAGTYAGEGCADGTRRVIEQADVIITVGVRFTDTITVGFTQQIGTAKNIDVQPFSVTVAGQRFDSLPMSTVIEELRQLCQRYAARWTLDYCQPAPLAANDQPGLTQNAFWQAIQAFLQPGDLLVAEQGTAAFGAAALRLPTGAKLVVQPLWGSIGYTLPAAFGAQTAEPERRVILLIGDGSAQLTVQELSSMMRDNLKPLIFVLNNGGYTVERAINGASQRYNDIADWNWTQIPQALSTACPAQSWRVLETVQLTEVLKLIADARRLSLVEVVLPRLDMPPLLQQVSASLHQRNSAQ

SEQ ID NO: 569 - protein, 558 aa, Mycobacterium aquaticum
MSENAYTVGDYLLDRLAELGVTEIFGVPGDYQLEFLDHILAHPRVRWVGGANELNAGYAADGYGRLRGMAALVTTFGVGELSAANAVAGSYAEHVPVVHIVGAPSKDAQGARRIVHHTLGDGDFDHFLRISREITCAQANLVPATATREIDRVLSEVREQKRPGYLLIATDVARFPTEPPAAPLPRYTAGTSPRALTLFTAAAAELIDNHRIAVLADFLVHRLGCVKELNALLAADTVPHATLMWGKSLVDESSPNYVGIYAGAASEDSVREVIEDAPVLVTAGVLFTDMVSGFFSQRLDPARTIDIGVNQSVIAGQVYAPLDMSAALEAVTAILSERGITSPELPPAPTRMQTQAPGRDATLTQEALWDSLSQALTPGNVVLADQGTSFYGMAGHRLPSGVTFIGQPLWGSIGYTLPAALGAGLADRSRRTVLLIGDGAAQLTVQELGTFGREGLAPVVVVVNNDGYTVERAIHGVTAEYNDIAAWRWSDLPAALGVTDALTFRVTTCGELADALAAAAATADRMVFIEAVLARMDIPPLLTELAQSASEANSRGAS

SEQ ID NO: 570 - protein, 551 aa, Mycobacterium kubicae
MSTTPTVIDYVLRRLHEIGISDVFGVPGDFAFPMHDAIVAHPEINWIGCCNELNAAYAADGYARVRGVGAVSTTYGVGELSAISAVAGAYAEHLPVFHLVGMPNLATQANRALVHHTLGNGEFELFRKMADIVVGASAIITPANVVSETERLIHEALYNRRPVYLAFPTDVVDKPILATSAPLPLPVSEPEALTAAVDAVAQALSAASTACVLPGLLLHRLHITDIATQFVDAAGLPFATMFADKSAIDEDHPRYIGMYDGQLMEEDVRVFVESADVVITVGTMQTDFNTGAFTARLDPARTIDIGLHRTTVGSAVYQNVEMADVLRELASRAWTKRFPPGPRPTSLGPVVGSAAEPITAAALYPRWADFLREDDIVIAETGTCSMGLAFAQLPHGARFYNQTLWGAIGWATPASLGAAVAAPDRRVVLITGEGSHQLTVQEISQFHRLGLRPIIFVLNNSGYLIERLLCKDPGIVYNDVATWNYAELPHALGCDDWFTERVTTCGELDEALAKAAQGDQATYIEVVTDTYEAPPLPNKLHENVKTLYNIG

SEQ ID NO: 571 - protein, 558 aa, Mycobacterium szulgai
MVVTEPVYTVGDYLLDRLAELGVTEIFGVPGDYNLKFLDHIVAHPAIRWVGNANELNAGYAADGYGRLRGMAAVVTTFGVGELSATNAIAGSYAEHVPVVHIVGGPTKDAQVARRALHHSLGDGDFEHFFRISREITCAQANLMPATACREIDRVLCEVREQKRPGYILLSSDVARFPTEPPADPLPRYTGGTSPRALALFTEAATKLIDDHQLTVLADLLVHRLHAVSELEALLAADVVPHATLMWGKSLLDESSPNFLGIYAGAASTERVRVAIEDAPVLVTAGVVFTDMVSGFFSQRINPARTIDIGQYQSSVGDEVFAPLEMGAALAALTEILTRRGVSSPAVAAPPEAPPPITPARDEPLTQQMVWDRLCAALTPGNVVLADQGTSFYGMADHRLPHGVTFIGQPLWGSIGYTLPAALGAGLAHPERRTVLLIGDGAAQLTVQELGTFSREGLSPVIVVVNNDGYTVERAIHGETAPYNDIVGWSWTEVPNALGVTGHLAFRAQTYGELDDAFTAAAVHQDRMVFVEVALPRLEIPRLLGQLVGSMSPPDDRR

SEQ ID NO: 572 - protein, 559 aa, Unknown
  Agreia sp. VKM Ac-1783
MTITDGFVSVGQYLATRLLQLGVRHVFGLPGDFNLNLLDEMATVEGIEWVGSSNELNAAYSADGYARVGRCAGALVTTFGVGELSALNGIAGSFAEHVPVIHIGGLPARASMDSSAPLHHTLLDGDYGHFVRMFREVTVADAIIDEATAAGEIDRLLVAMISASKPVYLGVPLDVAKAPVSARSLDVPLAPLASDPHALSAFAVALSREFADARSLVVLAGPDIHRRGIERDVAELAELPGISIASQSGSKAILDESHPSSLGTYLGATTRNAESRARVDDAEHLVMIGTAFSDFTTGFFTHGYDPASAVELALDHARIGHAVYPGVRLDDAVRALRHAAELAPLQVGPVIEPVAAASRVTVEGDSALAHDSFWPEIQDWLEPDTTIAAEAGTAFYGVLDLDLPERSDLMGQPIWSSIGFTLPAIFGAMLARPDRRPVLFIGDGSAQLTIQELGHLYAYGRNPVVFLLDNDGYTVERKIQSPDARYQDIVRWNWDLVPAAFGADDISVLSASTSAELQTALSRARAADRGAFIRVVLPKYDAPRLLEVLARGISEVNKH

SEQ ID NO: 573 - protein, 549 aa, Proteus mirabilis
MNKTVVEYMLNRLYDLGISDVFGVAGDYAFPIEDTICNSNHIRWIGNCNELNAAYAADGYARIKGMAALSTTFGVGELSAINAIAGSYAENLPIFHLVGMPASGVQKSKRLVHHTLGNGDFDIFYQLAQRLACAHAILTPENCIAEMERLIATALKERRPVYIGLPSDYAVMPVIENTSVTTQKKPISDKEILEKVVSLIIDKLTQSNNICVLPGILSTRLGLSDNVQAFIDKTGLPYATMFMDKSILNESNTQYVGMYDGQLMTPDVREFVENSEYVLGIGAMMTDFNTGSFTANIKPEQFINIMPKYVEIDSVIYSSVYMEDILSELTKRLPNKTYHQIKVKGLGEAILSDNGKVTAQYLYPRLEKFFRPNDIIIAETGTSSMGLGFTLLPEGAQFHNQTLWGSIGWATPASFGAALAAPDKRVILITGEGSHQLTVQEISQFVRFRLKPIILVLNNDGYLIERLLCDYPEAYYNDLAQWNYHQLPKAFGAKDWHCVKVTTIDELNKALEVAESTENASYIEIVTERYESSELAKKLKESKSSLYSF

SEQ ID NO: 574 - protein, 561 aa, Bacillus cereus
MIHLKTQYTVSTYLLDRLSELGIEHIFGVPGDYNLAFLDDVIAHENVEWIGNCNELNAAYAADGYARIKGIGALITTFGVGELSAINGIAGSYAENVPVIKITGTPTTKVMENGALVHHTLGDGKFDHFSKMYREITVAQTNLTPEHAAEEIDRVLRACWNEKRPVHINLPIDVYNKPINKPTEPILHKPILSNKETLDKMLLHAISKINSAKKPVILADFEVDRFHAKEYLYQFVEKTGFPIATLSMGKGIFPEKHPQFIGIYTGDVSSPYLRKRIDESDCIISIGVKLTDTITGGFTQGFTKEQVIEIHPYTVKITDKKYGPVVMKDVLQQLSNVIEHRNEETFDIKPFISESLSITEKFNPKPQMVTQKRFWQQIYHFLQENDVLLAEQGTPFFGSAAIPLPNDTTYVAQPLWGSIGYTLPALLGTQLANLSRRNILIIGDGSFQLTVQELSTILRQNLNPIIFLINNNGYTVERAIHGQNEPYNDIQMWDYTKLANVFGTEEKSLTCTVENEIELQEVLTKISIDKDQLTFVEVVMSQGDQPELLAKLGKRFGQQNS

SEQ ID NO: 575 - protein, 548 aa, Staphylococcus carnosus
MMKKRVGEYLMDCLSNTGVEKVFGVPGDFNLAFLDDIISRDDIEWVGNTNELNASYAADGYARMKGISAMVTTFGVGELSAVNGIAGSYAERVPVVAITGAPTRAVEDAGKYVHHSLGEGTFDNYRKMFKEITTAQGYITPENAQTEIPRLLDAALAEKRPVHLHLPIDVAMTEIEVESTYEVPERKVEDVSKYIAMVKDKLESASQPVIIAGHEINSFKLHEQLEDFVNKTHIPVAQLSLGKGAFNEENPYYMGIYDGSIAEENIRDYVDNSDAILNIGAKLTDSATAGFSFEFDIDDVVMLNQHNFKMNETVAEDVTLPDLMDGLMEMDYVNEADYPKFKRPETGQYELNGDALTQETYFKMMQDFLAPSDVILAEQGTSFFGAYDLALYKGNKFVGQPLWGSIGYTLPATIGTQIADPKRRNLLLIGDGSLQLTVQGISTMIRQGLKPVLFVINNDGYTVERKIHGENEPYNDIFMWDYKALPAVFGGEDVVKVRDVSTSEELDQAFEAIKAYPDMMHFVEVKMAMHDAPHKLDAIGKAFAKQNS

SEQ ID NO: 576 - protein, 550 aa, Citrobacter youngae
MQTPYSVADYLLDRLADCGVDHLFGVPGDYNLQFLDHVIEHPSVRWVGCANELNAAYAADGYARVAGAGALLTTFGVGELSAINGIAGSYAEYVPVLHIVGAPCCGAQRRGELMHHTLGDGDFQHFYRMQQAVTTASAVLDEQNACYEIDRVLRAMLTERRPGYLMLPADVAKQPATPPNDPLIVSQSEPASSVAAAFRYHARERLLDSPRVALLADFLALRFGLQPVLQRWMAETPMAHATLLMGKGLFDERHPAFVGTYSAGASSDYVRQAIEEADTIMCVGTQFVDTLTAGFTQRLPPERTIEVQPHASRVGSQWFNVPMEQAVTTLRELCLEMSFSLPPERPPVERIQIEKGLLTQENFWHTVQHYLAPDDIILVDQGTAAFGAAALSLPSGAEVLVQPLWGSIGYTLPAAFGAQTACPDRRVILIIGDGAAQLTIQELGSMLRDGQSPVILLLNNDGYTVERAIHGANQRYNDIAGWNWTQVPQALSRECQAECWRVKQAVQLEEVLARLSHPQRLSLIEVVLPKADLPELLRTVTRALESRNGG

SEQ ID NO: 577 - protein, 554 aa, Providencia rettgeri
MEISMMNKTVIEYVLDRLYQIGIHDIFGVAGDYAFPIEDAVCESEKMRWIGNCNELNASYAADGYARVKGVAALSTTFGVGELSALNGIAGAYAEHLPIFHLVGMPASGVQKNHRLVHHTLGNGDFDVFYQMSQHLSCAHAILTPENCIAETERLITTALQESRPVYLGFPSDYAVMPIKADKTSETITINKSHSESLSAAVTAIVEKLTSSTKACIIPGILTARFGLTTDVEAIIQKTGLPYATMFMDKGVLSESNSRYMGIYNGKLMNPEVREFVESCDCVMGIGAVLTDFNSGSFTAAIAPESCINILSDHVKVGSAIYPNVLMKDVLHKLKELVPSLNHVGIKAQDLGSPQQGENGQITASYLYPRLEKMFRKDDIIIAETGTASMGLGFALLPENAQFHNQTLWGSIGWATPAAFGAAIAEPHKRVILVTGEGSHQLTAQEISQFARFGLKPIILVLNNDGYLIERLLCKNPEAYYNDLPQWNYAQLPAALGCKDWYCQRVTNCIELDNAIKQAELSNHAAYIEVIMDRYAASELAEKLGKSVASLYSF

SEQ ID NO: 578 - protein, 547 aa, Edwardsiella tarda
MTSVIEYVLSRLYDLGIRDIFGVPGDYAFPIEDAVCADPRLRWIGNCNELNAAYAADGYARLHGLAALSTTFGVGELSALNGIAGAYAESLPLFHLVGMPASGVQAAGKLVHHTLGDGNFTHFAQASAAVVCAHTILTPENCVAEMERLIDAALRYRKPVYIGIPSDYAVMPFSATTTPSTPLRSDPQTLAEVSAQIVERLQQSQQACALPGIYLTRHQVRQEAQALIEAADLCFATMVMDKSVLDESHPNYIGMYNGHLLNPEVRDFVERCDCVLLMGTLLSDFNTGGFTARLDPSHCITLLPESVRIGATEYSQVLLKDVLNAVAQQISPLPRPANAPRAQPLAPVNASGAITAPYLYARWQQMLRPDDILVAETGTVSMGLSFALLPRGASFHNQTLWGAIGWATPAALGTAIAAPTQRTILISGEGSHQLTVQEISQFARHGLKPLIFILNNDGYLIERLLCQDGEASYNDLAQWQYAQLPPALGCQGWFCARVSTCEALDEAIRHAEHCDSAAYIEVITGEYVASPLAEKMHQAMASLYHAD

SEQ ID NO: 579 - protein, 548 aa, Listeria grayi
MYTVGQYLVDRLEEIGIDKVFGVPGDYNLTFLDYIQNHEGLSWQGNTNELNAAYAADGYARERGVSALVTTFGVGELSAINGTAGSFAEQVPVIHIVGSPTMNVQSNKKLVHHSLGMGNFHNFSEMAKEVTAATTMLTEENAASEIDRVLETALLEKRPVYINLPIDIAHKAIVKPAKALQTEKSSGEREAQLAEIILSHLEKAAQPIVIAGHEIARFQIRERFENWINQTKLPVTNLAYGKGSFNEENEHFIGTYYPAFSDKNVLDYVDNSDFVLHFGGKIIDNSTSSFSQGFKTENTLTAANDIIMLPDGSTYSGISLNGLLAELEKLNFTFADTAAKQAELAVFEPQAETPLKQDRFHQAVMNFLQADDVLVTEQGTSSFGLMLAPLKKGMNLISQTLWGSIGYTLPAMIGSQIAAPERRHILSIGDGSFQLTAQEMSTIFREKLTPVIFIINNDGYTVERAIHGEDESYNDIPTWNLQLVAETFGGDAETVDTHNVFTETDFANTLAAIDATPQKAHVVEVHMEQMDMPESLRQIGLALSKQNS

SEQ ID NO: 580 - protein, 553 aa, Unknown
  Psychrobacter sp. 1501(2011)
MSEHAYTIADYLFDRVAEAGATEVFGVPGDYNLSFLDNIIASDKLRWVGNTNELNAGYAADGYARERRFAAMVTTFGVGELSAINATAGSFAEYAPVLHIVGAPDTELRKGKRRLHHSLGDGEFNHFIKMAEPVSVARAEITAKNAASEIDRVIRMVLKKQRPGYLLLSPDIAKLPIYPPTTKLKDSEEDITSQMALADFKEELAAFIQGKATTLIADLMVHRLGLQSQLKALISDTKIPYATLSWGKSLIDENGERWAGVYVGEASQPVVKDAVENAECLIKLGVNYTDTTTAGFTQNIERSRVVDIHQERATVGDKFFAPIAMKDALQALHEVLTSGIEIKPKPLIDKVGKHQQQGGDDEPLLQKDLWHIIAGSLDDSNIVFADQGTSYFGMSEVRLPEGVTFYGQPLWGSIGYTLPASLGAGLASPNKRSVLLIGDGSALLTIQDLAVMLREKLNPVILLINNSGYTVERAIHGEKQPYNDIPMCDWQLMPKAFGANEGNCVTLKVNTPVELKSALEQAKNTPDKMVFIEVVTEVMDIPSLLKQVAAALQ

SEQ ID NO: 581 - protein, 557 aa, Hafnia alvei
MSKTLNSNIYSVSDYLLDRLSQAGIQHVFGVPGDYNLRFLDFVTAHPQLEWVGCANELNAAYAADGYARCAPAAALVTTFGVGELSAINGTAGSYAEYLPVIHIVGAPNRRSQQKGELLHHTLGDGDYGHFYRMAAEVTCSQAVLTPENAALEIDRVLSDVLYHRRPGYILLPSDVCDEPIRTELYPFAARQDEVTGLSEFIQAARELLKPARKVALLADFLADRFGQKQQVQQLSDLQGVASATLLMGKGVLDESRPNFIGTYAGGASQPKVKAAMENADVLISVGVRLTDSVTAGFTHQIAADKTIDLQPFSASVAGQVFSQLPMGDALAALTELAKELSVEWQAPESLRDCLPESHGNKLDQPAFWQQMQRFLRPDDIVVAEQGTASFGSATLRLPKGVTFIVQPLWGSIGYTLPAILGAQLAQPHRRVVLIIGDGSAQLTIQELGTLLRHGLKPVIILLNNDGYTVERAIHGPEESYNDIAAWNWTKIPSALSVNGDFSTYKADSVPALEKVLSEVNVPKALTLIEVMLPKMDVPEYLAKLSKAIAERNAAHE

SEQ ID NO: 582 - protein, 560 aa, Rhizopus delemar
MPSIQIGQHLLNRLKEINIDVVFGVPGDFNMPLLDIIEDDPKLTWGNNANELNASYAADGYARIRGAGAVVTTFGVGELSAVNGVAGSYAEMLPVIHIVGTPSTKSQAAGAMLHHSLGDGNFDVFFNMSSMIACASTHLKKQTAIAEIDRVISQAVLSKRTGYIGIPIDLIKTEVEIPEELSPLQTTLPKNNPEVQAIALKVVTEAIQSAKHPVIIVDGCVLRHRCQKPVQEFITRSGFPTYVAPMGKGAVDESIENFRGCYSGNVTLEAVNEEIKLADLIIEIGSIKSDFNTGNFSYSLDRSKTITLHSFATIVFCAEYQKVSMMEFIPLLTQALPQQPRMFNLGPRAKPVPIQPGTEITHNYFWHKVPEYMEENAIVCAETGTAEFASLNMDGPKGTTYITQILWGSIGFTVGASVGAAIAARDRRVYLFVGDGSFQLTCQEIAVFLRHGLTPVIFLLNNDGYLIEKLIHGPDRAYNNYQMWNYHKTLDYFGAHLEHNKSMGVPPVGFEGKVATRDEFESAMKQVQANPNKIHFLEVIMPQFDAPRELELLVANSENR

SEQ ID NO: 583 - protein, 550 aa, Unknown
  Pantoea sp. GM01
MKTLNVGEYLLHRLHQSGIRHLFGVPGDYNLQFLDSVIAHPEIAWVGCANELNAAYAADGYGRCNGAAALLTTFGVGELSAINGIAGSYAEYVPVIHIVGAPASKVQQQGDCVHHSLGDGDFGHFLRMAQEVSAASAVLTADNAVAEIDRVIDEALQQHRPGYLLLAVDVAAAEVTMPAVKSDAQPSHHQIAAAFADAAERLLAPAQRVALLADFLASRWQLQPQLETLRQLRAIPAATLLMGKGVLNEQQPGYVGTYAAEGSSDAVRQAIEDTDVTLCVGVRFTDTLTAGFTQNLPEARVIDLQPFQATVGGEVFAPLSMEQALDALLPIYQRHCAHWQLAAEIECEENEQIDAAVISQHAFWQAMQRFLQPGDIILADQGTAAFGAAALRLPQDAQLLVQPLWGSIGYTLPATFGAQTAQPDRRVILIIGDGSAQLTIQELGSMQRDGQQPIIFLLNNDGYTVERAIHGAEQRYNDIAQWNWTALPQAMSLQCAAQSWRISETVQLDAVMAQLMRNRRLSLVEVVMDKQDLPPLLRKVTAALHQRNSR

SEQ ID NO: 584 - protein, 571 aa, Yarrowia lipolytica
MSDSEPQMVDLGDYLFARFKQLGVDSVFGVPGDFNLTLLDHVYNVDMRWVGNTNELNAGYSADGYSRVKRLACLVTTFGVGELSAVAAVAGSYAEHVGVVHVVGVPSTSAENKHLLLHHTLGNGDFRVFAQMSKLISEYTHHIEDPSEAADVIDTAIRIAYTHQRPVYIAVPSNFSEVDIADQARLDTPLDLSLQPNDPESQYEVIEEICSRIKAAKKPVILVDACASRYRCVDETKELAKITNFAYFVTPMGKGSVDEDTDRYGGTYVGSLTAPATAEVVETADLIISVGALLSDFNTGSFSYSYSTKNVVELHSDHVKIKSATYNNVGMKMLFPPLLEAVKKLVAETPDFASKALAVPDTTPKIPEVPDDHITTQAWLWQRLSYFLRPTDIVVTETGTSSFGIIQTKFPHNVRGISQVLWGSIGYSVGAACGASIAAQEIDPQQRVILFVGDGSLQLTVTEISCMIRNNVKPYIFVLNNDGYTIERLIHGENASYNDVHMWKYSKILDTFNAKAHESIVVNTKGEMDALFDNEEFAKPDKIRLIEVMCDKMDAPASLIKQAELSAKTNV

SEQ ID NO: 585 - protein, 574 aa, Unknown
  Acinetobacter sp. CAG:196
MNTAEYLVKKLEELGVNEFFGLPGDYNFNLLYAVENNPNTCWIGCTNELNAGYAADGYARMRGYGALITTYGVGELSAMNAIAGSLAENVPVISIVGVPATKTIENKTCVHHNFQDVDYHACYEAHKHVTAAAAFLTRDNAKMEIDRVLKTFVKERKPVYIAVPLDIAKMEISDKEVSYDWISDEETLRLVSNKIAAKINNAQKPVILGDLLVKRFDSRIEYKEFVEKTRIPTTNFLMGTNLIDMDYDLYLGGYYAGFENPTAEKYVNETDCLIAVGPVYTDLNAFGFNLPYKINNQIAIYGTHTYVEGEKYDNVKMSDVLEAVTKLVDSKDMKILKPAIGYEHKASSPDALTSEYIYPRLQEFIKDNDIIVAETGIIPHGVAPMKFPATAELQTQTLWGSIGWATPAALGVCLAKPKSRVILITGEGSHQLTAMEIGNMLRRGVKPIVIVLNNKGYTIERVLSETPKDCFNDIMQMNYSKFARVFEGDVWSTKVSTADDFDKALKVTQIMNKMCYIEICTEAMDMPKLTQDLIANLKSKAPKIEAVKKEEPVKLENSGSMAFETTVHKGFTEE

SEQ ID NO: 586 - protein, 548 aa, Plesiomonas shigelloides
MAKTVIQHVLSRLYDLGISDIFGVPGDYAFPIEDAVCDDNRLRWIGNCNELNAAYSADGYARIHGMAALSTTFGVGELSAISGIAGAFAESLPIFHLVGMPASSVQAQGGLVHHTLGDGHFTTFYEATAPFVCARAIMTPENCVAETERLIAAALRYRKPVYMVFPSDYATMPIVEMAVPATVTESSDPVVLTEVVDILADRLNNSQQACVLPGIYLARHGVRQETLSLIEAANLPFATMMMDKSVLDESHSNYIGMYNGNLMDANVRDFVESSDCVLRIGAIMSDFNTGAFTARLDSRKCIAIMPESVQIGGAVYNRVLMKDVLEAVAKKVSKKAFPAHAPKVTALPVVTASGKITAEYLYSRWQQMLKPNDILMAETGTSSMGLGFARMPQGSTFHNQTLWGAIGWATPAAFGAAMAAPEQRTVLITGEGSHQLTAQEISQFYRFGLKPLIFVLNNDGYLIERLLCKDGDIYYNDLAQWKYEKLPEAMGCENWFTARVTTCEELDAAIRQAETCGTGAYIEVITEKYASSELAEKLHQSINSLYSA

SEQ ID NO: 587 - protein, 553 aa, Cedecea davisae
MRYCVADYLVDRLNECGIRHLFGVPGDYNLVFLDHVIAHPELAWVGCANELNAAYAADGYARCKGAAALLTTFGVGELSALNGVAGSYAEHLPVIHIVGAPNSHAQQRGELLHHTLGDGDFRHFLRIAEEVSVAQATLTPANACTEIDRVILEALKQQRPGYLLLPSDVAEAPATRPTKRLDVAAAAAEPATLEAFRHCAQAKIAESRSASLLADFLALRYGLQEALQQWMDGTPMPHASLLMGKGLFDESKPGFLGTYSGAASEPQVRQGIESAGVVICVGVRFTDTITAGFSQKLSQQQTIDVQPNAVRVGERWFSGISMAQAVDVLHQLCKRQASAWPAATQRPSELQPGNGDKLDQHALWHTLQNALQPGDIVLADQGTAAFGAAALTLPEGVTFIAQPLWGSIGYTLPAAFGAQTAHPNRRVLLLIGDGSAQLTIQELGSMLRDGQKPVVLLLNNDGYTVERAIHGPEQRYNDIAAWDWTRLPQALSVDGQAECWRVTETAQLAAVMEKLASPERLALIEIMLPKQDIPELLRAVTSSLGKRNSEMEH

SEQ ID NO: 588 - protein, 553 aa, Chania multitudinisentens
MSKNYTVADYLLDRLAQIGIRHFFGVPGDYNLQFLDHVIAHQQITWVGCANELNAAYAADGYARCKPAAALLTTFGVGELSAINGIAGSYAEYLPVIHVVGTPTLRAQRAGDLLHHSLGDGDFGHFSRMAKEVTVAQASLTASNAEAEIDRLLTTALFEHRPVYLLLPSDVAEAPLASRPAPLMLRQPNLSEASLQGFIAAAREKLQAAQRVSLLADFLAERFGAEKALEQWMNEVNIPHSTLLLGKSVLDETHACFTGTYAGAASDPQVKQLIEGADVVINVGVRFTDTITAGFSHQLPYEKCIDLQPFEARVGQQVFSQIPMHDAIKALHQLTLSLAPLWQLPAITRPSLPEPNGSGLDQHAFWQQMQNFLQPGDILIAEQGTSCFGAAALNLPRGCRFIVQSLWGSIGYTLPAAFGVQTAEPERRVLLLIGDGAAQLTVQELGSMLRDGQKPVVFLLNNNGYTVERAIHGPEQRYNDIAQWNWTQLPQALALEPQVKCLRVSEPEQLCQALDKVNDREYLLFIEVMLPQMDIPELLDTISRAIQARNMAA

SEQ ID NO: 589 - DNA, 1047 bp, Artificial Sequence; identical to SEQ ID NO: 32
  Synthetic polynucleotide

SEQ ID NO: 590 - DNA, 1017 bp, Artificial Sequence
  Synthetic polynucleotide
atgcgcgtgatgcagattcaagacgattggggccttgggaatctgcgtctagccgagcgggcgcagccgcagccaggtcctggccaggttctgctgcgtatgcgcgctgcaagtctcaactatcgtgacctggtcgtaccggaaaggggttacggatccttcactggtacgttgcccttaatcccggtttcggatggcgtaggtgaagttgtggaagttggcgctggtgtacgccgtgttgcgccgggcgaccgtgtgtgtccatgctttttccaaggatggataagcggtgatccggagctgggccgtatgaccggttcactgggcggtccgctggacggcgcaatggctgaatttatgtgcctctctgaacagggcgttgtcaaaatcccctcctgcctgagcgatctggaagccgctacactgccttgtgcagctttgactgcgtggtctgcgctggtcacccacggtcgagtgggtccgggtgaacgcgttctggtccagggaagcgggggcgtagcactgttcgctttagcgttcgcacgtatcgctggcgcccatgtaactgttatttcttcctctgatgaaaagatcgagagactgcgtgctctgggtgctgacgcgaccatcaactacacgcgcactccggaatggtcgaaaaccgcacgtgagattactggtggccgcggttttgaccacatcgttgagctgggcggtgagaaaaccctaccgcaatcgctccgttgcatccgtgcaggcggtaccctgtctatgattggggtgctgagcggttctctgcttgctgtgccactggggttgatcgtaactcgccaggttcgtctgcaaggcattacggtgggacaccgtgacggcttcgaagctatgctgcgcgcattagaacagcatcgtccggccatcaccgttgatagagtttttgaatttactgctcttcgcgaagcgctagcttatctgcgtagtggtgttcagttcggcaaaatttgcatccgtcaccctgat

SEQ ID NO: 591 - DNA, 1098 bp, Artificial Sequence
  Synthetic polynucleotide
atgaaggcggcagtagttaatagcgtgggtgggggcttcactatagaagacattgagatcgccgaaccgatcggccgcgaagtcctctttgatgttaaagcttccggtctgtgccgttctgatttaacactgtcaaccacgaacttcggtttcccatttccccaagttctgggccatgaagctgcgggtgtagtgactgctgttggccctgacgtaaaagagattaaagtcggtgaccacgtggttgcatctctgatccagtactgtgggcactgccgtgcctgccgggaatcgcgcatgtatgagtgtgaatttccggaagaaacccttcgtggccctgatgaggctccgcgcctgagtcgtaaaggcgaaccgatcttccagacctacggaattgcaggtttcgcggaacaggctttggttcatgaacaccaagtggcaaaaatcaacccggacatgccgttcccacaggcgtgcgtcatcggttgcgccgtgatcactggcgcgggtgctgctctgaacaccgctcgtgttcgcccgggcgatactgttgcagtagtcggcctgggtggcgtaggtctgtccattgttaacggcgctcgtatcgccggagcatctaggattattggggtcgataccaacccggagaaggaggaatttggtaaaaaattcggtatgacgcactttgtgaatgctggtgaccgtgacgttatagaacagatcttcactgcgactgacggccgcggcgtggataagtccttcgaggcactgggtatcgtacccaccatggaaaccgcgattgcggcaactcgccagggtggtgatgtttacgtcgctggcgtgttcaaaccggaaatggaatggactatcaacccactaaatgagttctttgttcatcgtcggcacattcacgcggtttatatgggtaacaccgatatcaaaaccgacatcccgcaatacgtagaattttatcagcagggccgtctgcacctcgatgacttggttgctacagaaatcgccctagatgacatcgatgctacgtacaaagcaatggttgaccatcatgcagggatcgggcgtgtagttatcacatctttc

SEQ ID NO: 592 - DNA, 1047 bp, Artificial Sequence
  Synthetic polynucleotide
atgaagagccaggcaattgttgagtacggtcaacccctgcaagaagtaaccgcggacatgcctgaaccaaaaggcggggaagtgttggtgaaagttagtcattgtggcgtctgccactctgatgtacacttacatgacggttattttgatctgggtggcggtaataaactcgatgttcgtggcggacgccagcttccgttcacactgggtcacgaaatcgagggtgaagtcgttgctgtgggcccggacgctaagggcgttcaggtaggcgaccagcgtgtggtttacccgtggataggttgcggcgagtgcccgacgtgtaaacgagatgaagaacagctgtgcaacaaacctagacagctgggtatccaggtcgccggtggctatgcaactcacgtaatggttccggatgcgaaatacctgctggactactccggtgttaaagagggtctggctgctacctacatgtgctcgggcctgactgcttattctgcaatgaagaaactaggggacattagcccggaagaacgtgtgatggtggttggcttaggtggcgttggcatgatgggactgcaattcgccaaagcgatgttcgataacgccccactgggtgctgacgtcgacgatcagaagctccaggcggccatgggtgcgggagcacatcagacttataacccgaaagatgctgacgcaatcaaaaaggtactggctgacaccaacggtggggttccggctgccgttgactttgtgggctccgaagcgtctctgaaattcgcatcaagcatcgttcgcaaaggtggcaaagtcatcgtcgtaggactttttggcggtggtttcgctatgccaattccgatgttcccgatgagggcaatctccattgggggcgcatacgttggcagtctgggtgaaacccacgaaatgatggcgttagtcaaagctgggaaaatcgatccaatcccggttgaagaacgccccctggatcaagcttctaaaagcctggacgatctgcgcgaaggtaaaattatgggccgtgtagttctgaagcct

SEQ ID NO: 593 - DNA, 1089 bp, Artificial Sequence
  Synthetic polynucleotide
atgtcgagcgagtccattcctcagaagatgcgcgccgcgactataaaagactttaaaaaagggtatgaagttaaggatatcgacgtaccaacggatttgggcccgaatgacatcctcgtcaaaattgcagctgctggttactgtcacaccgatctgcaagtgatggaaggcgtttacgaatctcagggtgcaaaacccggtttagtaggctcacatgaaccggttggtatcgtggtcaaagcgggctctgacgctggaaaatccggtatcaaggttggcgatagggtgggcagcatcaacacctacggtttctgcggtaaatgcgactcttgcaagcagggcaaacagctttgtgataaactgccgggtatgctgggcctgactctgagcggcggattcagtcagtatatgaaagccgatgcgcgtgttgtatccaaagttcctgactcgattccgagcgatcaagctgcaccgctgttttgcgctggtgcgaccgtatacggcgcactgctggctgttaaaccggagaagggtcagtggctggctatggttggtatcggtggcttgggtcacctaggcgtgcaatatgcaaaggctatgggttgtaaagtaattgctattgacaaccgacgcgaagggctggatctggccaacaaaagcccagaccatctgaaacctgacaaaacattcttaatcgacagcaaagaggcacagaataaggtcgcggaagaactctctggttctttctacgaaactaacccgggcgtggatcgtgttgtgatcaactgcgaagatcgttccctgatcaaatttagccagcagttcctacgcaaaggtggccaactcgtggacgttgggctgccggcggatgggccgtttgagttggactcgttcgccatgaacttcaaagaacagaccatacgtggtcgcctgatttgcactcctgagcagtgtcaggatatgatcaatctgcacgcggacaacggctgcactacctttatcgaaaagacctatagtgttgatgaagccaacgacatggctgaacactacaactctaagaaattgcagggccgtctgtgcatggtattc

SEQ ID NO: 594 - DNA, 930 bp, Artificial Sequence
  Synthetic polynucleotide
atgtcgcacacgcgcaatttgcagatcatgaccgccgtggctataccaaagactcaaatcgcggctgtacttccgtcaggtgcaaccctcgaggcgcgtctggatattaggaacgaccgtcctgttccgacccccgctgaaggcgaagttctggtcaaactggaatatagcggggtttgtcattctgacgtgcactctgtacgtggtgaaactccgatgttaactgatgtcgcaggccatgagggtgttggccgcgtggttcaggaatacctggtaagtccggcggctcacgtaacaaaaatcccggccgagctggatccggacaccgctgcaccgctgctgtgcgcaggtattgctatgtactcctccatcatgaaaactaaaaccctgccaggcgactggatcgttctgcctggagctgggggcggtttgggtcatatgggtgtccagattgcggtgaaaaagggcctgaaagtcatcgccattgatagcggcgaaaaaaagaaacagctgtgcctcaaactgggtgcaactatctttctggattataaaaccgacaacgttgaatctgaggtcaaggccctcactagcggcttgggggctcacgccgttatctgtactgcgcaaagcgaagctgcgtacgaacagtctttacgtctgctgcgatccctgggtgttctggtgtgcgttggtatcccgaacgttccgttccgtctaccggcttcccccttcgatatgattgtaaaaggccttacgatcgttggcaactctgctggtaccgcacgcgaaatggaagaactgatggagatggccgtggcaggtgacgtcaaagcgcacattgagtgcttcgaatttgaccagatcgatgatgtgatacagcgccttggccgctcggaaatcgatggacgtgctgtaatgcgtattccagaa

SEQ ID NO: 595 - DNA, 1092 bp, Artificial Sequence
  Synthetic polynucleotide
atgaagagcaaagcagctttgctggtagattacaatgcgcctctggtcatcgacgaggtggacgttcagggtccgaaagaaggcgaagttctggtacgtataaaagctgccggggtgtgtcattcagatctacacgcgatcaacggccaatatacgcacaacttaccactcgttctgggtcatgaaggtgctggcattgttgaagatgtcggtcagggcgtaactaacgttcgcccgggtgaccacgtggttctgtcctggctgccgagttgcggcaaatgcaggccctgccttcgaggccgtccggcaaactgtgaggacgcatcttggccgtctgctggtacactgcgtgatggaacctcgcgttttggcaagaatggtaaaaccgtgttccactacggcgctaccagcactttctccgaattgactgtcgtgcctagccagtctgcggttccggtagcccgcgacgctcctctgaccgcactgtcactgatcgggtgcgccgtaagcactggtgttggggccgcgctcaacactgctaaactgtccccacaagaccgcgtcgccgttgttggttgcggtggagtcggtctgaacattgttcagggcgcacgcatcgctggagcgcagacgattgttgctgtggatcgttctagcgaaaatctggagctggctcgtcgtctgggcgctacccatcttgtcaactctgaagaaggcgatgtaatcgcaaacgtgcaggcgatcactgacggcggtgtagatttcgcgtttgaagctgttggtcgccgtgtgaccattgcgttggcaatggctctgctggctcgcggcggtagactggttctggtggggatggccagccgtgaagaggttctgggcctggacgttttggataccgtggttcgtgaggtgggtgtagtcggttgctggtatggttcctgtgacccgcaacgcgacttcccgcgtttagttgatttttacaaaagtggctctctgaaactcgatgaaatgatcgaagttcgtccgctggaagatataaacttagcattctccaaccttgctaagagcacagggggccggactgtaatcgctttc

SEQ ID NO: 596 - DNA, 939 bp, Artificial Sequence
  Synthetic polynucleotide
atgaaggcgtggcagtttactgaggtaaataaacccctggaactaattgaagccccggaaccgaccccaggtaaagacgaggtcaaaatcaaggtgaaagcatccggtctgtgccactctgatgttggcgttatcgaaggcgtaacgactccgagcttggggaaaattccaatgatcttaggtcatgaaatagctggcgttatcaccgaactcggtgaaggcgtgaccgacttcgaggttggagatcgtgtcgctgtgcgcgcaggtgcggacgctccgggcagtgcaactgatggcgggtacgcggaatttacagtttcaccgtctaaattcgtagtcaaaatccctgacaacgtggatttcattagcgctgcctccgctaccgacggtggtatgacctcgtatcacgctctgtctgtgactggccaagttaaagaaggtgataaggttgcgatcgtaggcctgggcggcctgggtctgtacggtgcacagatcgccctgggcctgggggcgactgtatacggtgttgatatcaaagaggaaagccgtaaagctgctgaacagatgggcgttaagaactgtgttaaagacgttagggaattagccgacgaggaaattgacgtcgtggtagatttcgtcggttatgaaactaccctgagcggatccatagaagctgtccgcccgaacggtcgtgtggtgcttatcggcctgggtgggtctgagggtaagattaatatttttaaattcgttacgaaatctctgacgatggcatctagtatcggcggcactactgatgatctcaaggcagttctggaactgatcggtaacggcgatgttaaacctctgctacatcagatcaaattcgacgagatttccgaaggtctgcaacagttggcggacaacaaagtaaccgggcgtttggtggcggttatcgacaac

SEQ ID NO: 597 - DNA, 1011 bp, Artificial Sequence
  Synthetic polynucleotide
atgaaggcggcagtagttactgacctcggtaaacccctggaaatacaagagttgccggtgccggaaccaggcccggggcaggtcctggttaaaatggaagcctccggtctgtgccacaccgatattcatgctgctcacggcgactggcctgtgaaaccgcgccctccattcgttccgggtcatgagggcgtaggcccggtccaggcagttggtgaaggtgtttcagctgatctggtgggcaagcgtgtagcgatcccgtggttaggtagttcgtgtggaacgtgccggtattgcgtaagcggctgggaaacactgtgtgagtctcaggttaacagcggatactctgtagatggttgctacgcagaatatgctgtggccgacgcgggcgctgttgtcccggtgccgcagggggtttcctcttttgacgccgctccccttacttgtgcaggcgttaccacctacaaagcgatcaaagtggctcgtgttgttccggctgaacgcgtcgcagtgttcggtgttggtgggctgggccacctggctgtgcaatacgctcgtctggtcggtggctttgtaactgcggtcgatcttgaaccggataaactgggtctggcacaccgtttaggcgccgaccagttggtgaatgctaggacccatgatccggtagaggaaatcaaaaaagcaggtggcgcggacgttgcggtggttctggccgcttcgccgaaagccttcgagcaggcctatcgttccctgaaccgcggtggtcgcctggttatggttggcctgccagcagataacgcagctattaacgtacctatcttcgaaaccgttctgagcggtatttctgttatcggctccatcgtagggacgcgtcaggaccttgctgaagtgttcgcgctgcacgcggcgggccgtactcaagtgattgctgagccgcgtcgcctggatcaggttaatgaaagctttgacgaagttctaggaggtcgagctgaagctcgtctagtcttcgagttt

SEQ ID NO: 598 - DNA, 1044 bp, Artificial Sequence
  Synthetic polynucleotide
atgcgctgctaccagattaatgagttcggtgggtccgtggaaccggccgacatcgaactgctacctgtaactggctcgtcagtccgtttgaaggttatcgcggctggtgtatgtcactctgatgttcatatatgcgaaggccactatgatctgggaggtggccgtaaaatctcctttgctgagcgaattaaattcccacgcaccctcggtcatgaagtttctggcgaagtggtcgaagttggcccggacgtagaaggtgttgcagtcggcgacgtgtgccttgtgtgcagctggatcgggtgtggcgagtgcgaacaatgcgcacagggtctggagaacctgtgtgttaacccgcgtttcgtaggtgttaaccgggatggtggctttgcggaatttgtggacgtaccggatccccgttacctgattgatctgggtcagttagacccgatcgcggctgctccaatggtttgcagcggtctgacaactttctctgccctgaaaaaattcggaccgctggaagggcgccgtcctatcgttgtggttggcgctggcggtctcggcctgattgcaatcgcagtcgctcgtatgctgggtagcgttggtgtagtagtcgttgaactggacgcggccaaaagggaggctgcgctcgctgccggagcgctggcagcgattgctccgggcgaatcagctctggaggacatccgccaggctgttgggggtccggtctgggctgttttggatcttgtgggtagtggctctaccgcaaagctggctgtggacgcactggataaaacgggcaaactggtagttgtgggtctgttcggcggcgcaatcgatcttcccgtgccgactttcccgctgaaggttctgaccattcaaggtagctacaccggctctccggcggaactgcgtgaatttgttgcgctggctcgtgaaaaagggttacctgctgcacccctggataaacgcccgctgtccgccgctccagccgccctggcagacttaaaagcgggtcgtgttatcgggcgggtagtcttacagccg

SEQ ID NO: 599 - DNA, 1080 bp, Artificial Sequence; identical to SEQ ID NO: 23
  Synthetic polynucleotide

SEQ ID NO: 600 - DNA, 1029 bp, Artificial Sequence
  Synthetic polynucleotide
atgatcccgaagatgatgaaagcggccttgtgcaccggagctgcaacaccccttgtgtgtcaggaaattgagacgccagtcccgcaagctgggcagctcctggtttgtctggaatcatgcggtgtttgccactctgatctgcatctgcgtaacggcgacgaaaatttaccggatgaattttatcctctggtactgggtcacgagggcatcggtcgcattgttgcaatcggcgaaggcactcagacttcgctgaaactgggtgaccgtgtgggtctgccgtggctgtacgacacctgcctggattgcggcccgtgtcttaccggcagcgaaaccttctgcactcatcagcgtgctcgcggaatacacgcgcacggtgccttcgctgagtacgcactgctggaaagtcggttcgcatgcgtcatcccggacggtattgatcctgttcaaggcgctccgctactctgcgcgggtctgaccgcttggtctgctctgcgtaaaacttccatccgaccaggcaaaacatgcctggtaattgggtgtggcggtcttggtcagtatgcaatcatgatcgcgaaggcccatggtgctactgtgattgcggttgatcgcgacccggctaaactggaagaggcacgtaaacgtggtgcggaccacctcgtaagcgcaggcccggatgctggcatgcaggttaaagccctgggtggggctgacatcagcatcaactttgcccctacgcccgcggtatggcagaccattgaacaagcggcaaacccgatgtctgatatcgttgcaatcgctctggttcacgaccccgtgccgttgtccatgatgtggctaattgacggcgggcaccgcgtgttcggctcctctgtgggcactcgtcaggacctgcgcgattttcttgacttcgctgtaaagaatcgtctggatgcggatgttgaagtcatcccgctctcgcaggtggataccgctttggatcgcctgcaagcaggtagtgtaactggtcgtctgtgcatagacttttctctg

SEQ ID NO: 601 - DNA, 1044 bp, Artificial Sequence
  Synthetic polynucleotide
atgtcgacgcagaccatgcgtgcgcaacgcttctatgcagatacaaaaatcattgccgtggaggacgtacctatcccagaaccgggccccggggaagttctggtcaaagtagctttttgtggtatttgccactctgacctttcactgatcaacggcactttcccgtcccagttgccggttgttactcagggtcatgaagcttctggtaccgtggccgctttaggcccgggcgtcaccggttgggcagagggtgatagagttgttgtagcggctggacgtccgtgccagggctgcccaaattgtgcgcgcggagactttggcaactgcctccggatacgtctgatggcattcgcttacgatggtgcttgggcacagtacactgtggcccaagcgttcggcctgacccgtgtgccggacaacgtgccgctggaacaggctgctattctggcggatgcggttagtactccttatggcgcagttgtccgtactggtaaggtaggtatcggcgaaagcgtaggtgtttggggcgtaggtggggttgggacccacatcgttcagctggcccgcctcgtgggtgccgctccgattatcgcagttgacatcaaaccagcagtcctagatcgcgctctggccttaggagctgattacgcttttgacgcgcgcgacggcgcgcttggtgaaaaaatcgctgaactgacgggtgggcgtggcctggacattgccttcgatgctgtgggtctgggctccaccttcgatcaggctctggcgagcctgactatgggcggtcgtctggtaggcgtgggtatgagcgccgacgcaccctctatcggtccgacctctttcttcaacctgactaggaagcaagttttggggcacctgggctaccagaacgcagatatcgctacgctagctaacctggtttccctgggtaggttggatcttagccgtagtatttccgaaatagtctctctggaggaagttgccgcaggcatcgaaaaactggaacgtgctgacggggacccgatccgtatcctggttcaaccg

SEQ ID NO: 602 - DNA, 1053 bp, Artificial Sequence
  Synthetic polynucleotide
atgtcgagcacgccagattttaacggctgggtagcccacgacccgtccgcagctgaggggaatatgaagtggggtaacttcgaacccaaagcgttcgaagaaaccgatatcgagatggaaatttctcattgcggtgtctgtggcagtgacatccacactctccgttctggatggggtccttcagactacccgcttgttgtgggccatgaaatcattggtcacgttactaaagtaggcaaagatgttaaagacttgaaggtcggtgatcgcgtgggcgttggcgcacagtcagaatgctgcgagagctgtagaccgtgcaaaatgaaacaagaaagcaactgcaactccttaaccatgacatataatgctaaacactctaacggtgacaagtcttacggaggctacgcgaaagcttggcgtgggccggcctcctttgctatccctattccggaaggcctgccgagcgagttcgcggcaccactgatgtgtggtggtgtaactgtttataacccgctggtatcgaacggtgctggtccgggtaagcgtgtgggtgttgtaggcgtcggcggtctgggccatttcgccctgctgttcgctaaagcattaggcgcggatgaagttgtggccatctctcgtagctcctctaaaaaagaagatgcgataaagctgggggctgatcgctttatcgctaccggcgaggaccctgactgggctaccaagaatgcaaacgggctagatctgattatcagtactatctcaggtagcttccccctggatcagtacctgaaccttttggacgttaatggcacatttgtgcagctgggcgccccggacgatccgctgccctcgttctctccgatgggcctgattttcaaaaacctgaaaatcgcgggttcccttatcggcacccgccagcaaatacgtgatatgctggaactagcaaaaaagactaacctccaggcttgggttcaggttaggccaatgtccgaagctaaccaagtaatcgtggactttgagaaaggtttgccgcggtaccgttatgttctgaaaaat

SEQ ID NO: 603 - DNA, 1050 bp, Artificial Sequence; identical to SEQ ID NO: 21
  Synthetic polynucleotide

SEQ ID NO: 604 - DNA, 1029 bp, Artificial Sequence
  Synthetic polynucleotide
atgcgcgcggcacagttgcctagcctcggttcagatctggaaatagtcgaggtaccggacccgaccccaggcccgggggaagtggttgttaggatcgctgcctccggtgtgtgccactctgatttaacaatccaacagggcggtccgggtatgccacccacgccctatttcccgtggactccgggccatgaaaatactggctttgttcacgctcttggtgccggcgtcaccggactggctgtaggcgacgcagttgcggtttggcctggttggggcgacggtacctgtcgtgtgtgcagagctgggcatgagcacgtatgcccgaacgttagttacgtgggtgtaactcagccgggtggatgggctgattacctgctggttccagcggcacgtcacctggtgagcctgggggatctggacccggtagccgctgcacctttgactgacgcgggcctgaccgcttatggcgcagtggcgaaagttctggaacgcctctccggttctgatcgtagcgtaggcattatcggtgcaggtggactaggccaattcgctattaagtacctggctgctctgacctccgccactatcgttgcgattgacaccgatgaagcaaaacgtgctcacgccctggacattggggccgctctgtctgttgatccgacgacagacgacgctatcccgcagctgcaaaacgtaagcgaaggcggtcttggtctggatgcggttatcgattttgtcggcatcgactctactctgtgtctggcggctgcaactaccgtggcatgcggtgctatcattctcgtaggcatcggaggtggcacgttggatttcggttacaccaacccgaaccagcaggtacaggtgtcgacgtcctctctgggtagccgcgcggacttagcaaccgttatcgagctgtggaaagaacatggaattaatgccgaaacgactcgttatcgcctggacgaagttaacgacgccctgcgtgatttggctgctcacaaaatcggcgaacgggctgttttggtcctg

SEQ ID NO: 605 - DNA, 993 bp, Artificial Sequence; identical to SEQ ID NO: 19
  Synthetic polynucleotide

SEQ ID NO: 606 - DNA, 1155 bp, Artificial Sequence
  Synthetic polynucleotide
atgaagatcacggcagctttggcgcgcggtgcccgtcaggctctggcagtaactgagctggaacttgacgaaccgcgtgatgacgaagttctggtgcgagtcgttgctagcgggatttgtcgcaccgatatcgatgtacgtgacggctatctgccaactcccacccctgtggttttaggtcatgagggctcaggtgttgtcgttcgtgtgggccgcctcgtacgtcaattcgcgccgggtgaccacgtcgttatgtcgatgggctcttgcggcgtatgcccgagttgccaggtaggtatgccggcgtactgcgttcagcacgtgccgctgaactttatgggctcccggcctgatggtagcgtgtgtatgcatgaacacggtgaacgcgttcactctcacttcttctcccagtctagccatgcaagttttacagtcgctcatcaatctagcctcgtgaaagttgccgacgatgtggacctgcgttggttaggaccgctggcttgcggagtcatgaccggcgcagggggcgttattaatactctgaaaccagaagctggtacctccatcgttatattcggtgccggcactgtaggtctaagcgcattgatggcgtctaaaattgtagcttgctcccgtaggatcgttgtggataacaaaccggagcgcctggcgcttgctcgtgaactgggtgctacagacacgatcctggcaactgccgacgctgatgtcgcggctcaggttcgtgctctgaccgacggcctaggcgcgcacaacgctttcgagtcatcgggtgttaagtctgtcatcggcgccgcgctcaccgcaattcgcgaacgtggtacttgtgtgatcaccggagtactgccgcaggggtccgttgtagaatttgacgcatggcaactgctgcgcggccgtactgtgcgtggtagcgtgatgggtgattgtctgccttctcagttcatcccgcgtctggttgagttttaccgccagggtcagctgccactggaaaaaattagccgtctgtatccgctggcggatatcaatcaggcaattgaagacggcatttcgggcgctgtagttaaagcaatagtagtgatgccgcatcccgacgcttcaaccacccaggattaccacgatcgtacgcagcaatctttc

SEQ ID NO: 607 - DNA, 1023 bp, Artificial Sequence
  Synthetic polynucleotide
atgcgcgcgctggagttagttgggttcgatggccccggttctctgcgtctcggtgaccggccggaaccggctccaggccctcgtcaggtcagggtgcgtctgcgcgctagcgcactgaatcatttggacgtatttgttacacgtggattaccgaagcgtccgcttcctgcaattctgggtgccgatggcgcgggtgttatcgatgctgtaggcgtgggtgttgaacgccgccgtgtaggcgacgaagtcgttatctacccggtggtttcgtgtggcgcatgcgagtggtgcacccgtagagaagaagtacactgcccgacgttcggaattttgggtgaacacatcgatggaacctttcaagagagtctggttgtcgctgaacgttccgcgttcactcgcccgcagcgcctaagctggccagaagtggctgctttgccgctgtctttcctgactgcctggcgtctgctgtttactcgtggtcgactagaacgtggcgactcactggtgatcgtagggataggcggtggggttgcgcttgcagctctgctgctgggtaaagctcgcggtctgcgtgttttcgtaacctctcgtgatccagcaaaactcgaacgcgccaaaatgttaggcgccgacgcggcctatccgagcaacgcgttcgcgaaacctgtccgtgaggctactggcggcgcgggtgctcgcgcagttgtggataccgtcgggccagctacttttgaagagtccttccgtgctctggcacgtgaaggtgagctgctgaccgttggttcgacctctggcccgaaagtggaactgatgctgccgcgcctctttttccgtcacctgtccctggtaacgagcactatgggtacttcccgtgagttcgaagcaatgctggcggacgtcgcccgcttccatattagaccggttgttgacgaaacgtaccctcttgcaaagggcgctgatgctttcgcccgactggaagctggtgaacagtttggcaaaatcgtgttggaacccggcagcggc

SEQ ID NO: 608 - DNA, 1353 bp, Artificial Sequence
  Synthetic polynucleotide
atggaggtgctgtcgactcatccggacatgccagaaccgttaggggccatgaatcacggcagctctggtcaaccccgccctccgacatccaggatcgaaacgccgaatctgcaaactccgtatgtccgtgatgacaccgaaagttcttacaccaaaaacgaatccaacaagcgtgctaaacttaccattaaagagaacttgcacactaaaacccatggtctatttggcgaagtacctgaggaacaggttgcaatcctcactccattcgttagcaagccgctgacgctggaactgcggaccgtgccggtaatccgtccgtccctgggtgaggtcgttgttcgcattgcttggactggaatatgtgcgtcggatatctacttcgcaaccggcaccgacgcgacatattgctctcactcacacatcggtggccatgaaggtattggccacattgtgcagtctcacgatccagctcacatcggccaggctgttggtatgcgttttatggcgtacacttgcggcgtgtgctgctactgtctcaaaggtgtacctgaaagctgtccgcgtcaggtttgcttcacccgccatctgcgcggtagctatcagcagtacgccactgttccgtacacgtccttagcgatccttccggactatgtcttccagcacgaaaaccctgctatctacaccactgctctgtgcagcggtgcagccgctctgaaggcactgcgtaaagctggcattcgtcccaacgatgtagtcgttgtaatcggtatcggtggccagatcggctatttggcaggcgttatggcgcgcagagtttactccgctcgtgtggtcggtattgatatagcctctaaagcgaacagcccgacgatctctgaagcttgcgacgtataccttccgagcccaaccgagggcgggactcatatgagcgatgaatttcaaagcctcttgcagtccacttgcactaaactgcgagcagacccaaatctaccacgtggcgccgacgctgttatcgctgccggttctagtgtggattcttatcgcgacctgcctagctacgtttgtgatggtggatctattggattcgtagggtccccgacttactcgattaccttcgatgtgaaacgcatcctggaaaggcagctgtctatcaaaggcaccctgatgggcgaccgtaaggacagttaccaggtgatggattacattcgttcaggtatcctgaaaccgaagatcaacgaaatcgagctgcaagacctgccggaatatatgcaggggttcctggcgcagaaaaactggggtaaaggcgttgcacgtattaacgggcccttaccgtcagcagcacccctgacccgc

SEQ ID NO: 609 - DNA, 1086 bp, Artificial Sequence
  Synthetic polynucleotide
atgaaggcggcagtaatttttgagaccaaagcccccctgcaaatagaagacgtcgtggttagcaatccgggtccgcacgaagttcttatcaggacggttgcttgtggtgtgtgccgctctgatttacatttcgtagacggcgcttaccctcacccgctcccagctattccgggccatgaagcagcggggatcgtcgaagccgttggttccgaggttcgtactgtgaaagtaggcgatgctgtggttacctgcttgagtgctttctgtggccactgcgaattttgcatcactggtcgtatgttcctgtgcgtatcagcggagacacgacgtggaccgaaagcagaagcacgtctgaaactggcgtctggtggcaacgtcaaccagatgctgaacctgagcgcctatgctgaacagatgctcgtgcacgaacatgcctgtgttgctatcgaccctgagatgccgctggatcgcgcggcactgattggttgtgctgttaccactggcgcaggagcggtattcaacacgaccgacgttacaccaggcgaaactgtttgcgtagtcggttgcggtggcatcggcctggctgctgtaaacgctgcgaaaattgccggtgccggtaagatcatcgcgctggatccggtccccgagaaacgtgctgtggcagaaaaactgggtgctactcacacctacgatccgctgaaggaaggggttgttggcgaggttgtcgaactgaccaaaggtggcgttcaccatgcaatcgaagccgtgggtcgcactcagtcggcacagactactgtagacgttctacgccgtgggggtaccgcgaccatcctgggcatgatgccactggacgctaaggtgggactgtctgcgatggaattgttaagcggcaaaaaattgcagggcggtattatggggtctaatcgttttccggttgatattccgcgcctggtcgatttctacatgcgtggccttcttgacctggacaccatcatcgctgagcgtctgcctctgagccagatcaaccatgcattcgatgaactgcgcaaaggtgacgctacacgttctgtgatagtattcgatcaa

SEQ ID NO: 610 - DNA, 1044 bp, Artificial Sequence
  Synthetic polynucleotide
atgaaggcggcaatctttactcagttcggtgggcccattaccataacggaggtcccggacccggttgtggctgccgatggcgtagttttgaaaatcgatgcaaccggtatctgccgctctgactggcacggctggaaaggtcatgaccctgatattaaactcccacacgtgccgggccatgaacttgctggcactatcgttgaagtaggtaaagatattaaaaattggaagcgtggcgacagagtcacaatgccgttcgttgctggttgtggccactgcctaccgtgcctgaccggaaacccacaagtctgcgaccatcagtttcagccgggattcactgcgtggggttccttcgctgaatttgttgcaatccgttatgccgatatgaacctggtgcgcctgccaacgactctggatagcgcgaccgctgcctcattaggttgtcgattcgcgaccgctttccgtgcactggacgctcaggctaaactgcgtcccggcgagtgggtagcgatctacggttgcggcggggttgggctcagtgctatcatgattgcagccgcaatgggtgcgcgcatcattgctatcgacatccaaaaggaaaaactggaaaaagctaaagagctgggcgcaaacgtggtttttaactctcgtgaagtgccggacatcgtggctgctattcacgaagtaactcacggtggagctcacgtttccatggacgccctgggtagccctgaaacttgtttcaacgccatcgcgtctctggcgaaacgcggtcgtcacgtccaggttggtctgatgcttgcggatcagaagcatccggcaattccgatggatctggttattgcgcgtgaactggagatctacggcagccacggcatccaagcgcaccgctatggtgcactgctgggcatgatcgaggctggtcggctgtacccagaacgtctgattcaggctcgcttaaccttgcgtcagggggtagattttttgcagaaaatggaccagttcccgggcgtgggtatttctgtcataacgtcgatctctccg

SEQ ID NO: 611 - DNA, 999 bp, Artificial Sequence
  Synthetic polynucleotide
atgatcaaggcgttcgctgcctttgagcctcacggcgaattaaaaccattcgaatacgacccgggtcagcttaaaccggatgaagtagaaatagacgttcaatattgtgggatctgccattccgatctgagtgtcattgacaatgagtggggcatcactgaataccccgtggttccgggtcacgaagtggtaggtaccattggcaaaatcggcgctgatgttaaacatctgaagatcggtcaggtcgttggtctcggatggcacgcaggctattgcaacgagtgcgaaccgtgtaaaacgggcgacaacaacctgtgcgcgaccgcacaggccacaattgtaggtcaccatggcggtttcgctgataaagtgcgcgcttctgcaaacagcgttgtaccgatcccggaagggattgacttggagtcggcgggtcccctattttgtggcggaatcaccgttttcaatccactggtgcagtttgatatcaaaccgactgacaaggtcgctgtcatcggtattggcgggctgggtcacatggctctgcaattcttgaacggctggggttgcgatgttactgcattcacctctagcgaaaacaaaaaaaaagaagcactggaattaggcgcgcaccatactctgaactccagggaccctaaacagatcgaggccgcggctggtcgttttgatatgattatctcaacggttaacgtaaaactggactggaatctgtacctaggtaccctgaaaccgcgtggccgcctccacttcgttggcgctaccctggatccgcttgatatcaacgtgttcagcctgataatggcgcagcgttctatctctggttcccctgtgggctccccgctgacaatcgccagaatgctagaatttgcgaagcgccaccatgtaaagccagttattgaaaagttttctttcgcagatattaacaaagcgattgaacgtctgcgtagcggtaatgctcactaccgcatcgttcttcatcgt

SEQ ID NO: 612 - DNA, 1020 bp, Artificial Sequence
  Synthetic polynucleotide
atggcagagatcccagaaaaacagaccgctttcgtctttaagaacggctcgttcgcgctggaaaaaaaagaaattgaggtacccaaacctgacgccggtaaggttttactgaaagtggctgcggcaggggtatgtcacagcgatctccatgttctgcacggtggccttccgtacccggacggtctgatcctgggccatgaaattgctggccacatcgtggcctatggagatggtgttgataaagctgcatttccgtccgacgcgctatacgctgtcgttggtccgaatccgtgcggcatgtgcaaggcatgccgtacgggggcggacaacgtatgtgaagatccgagtcgcactcacatgggtttgggctctccaggtggctacgagcaatatacacaggtgtctgcgcggaacatcactaaagttcctgaaggcattccggctgctgtagcagccgcgagcaccgacgctgttctgactccgtaccatgcactgaaacgtgctggtataaacggaatgacgcgtctgcttatcgttggtctgggcggtctgggtatcaatgccgtccagattgccaaggctttcggctcttatgtgatcgctgttgacccaaaagaatccagccgcgatctggcaaaacaatacggagcgaacgaggtttatgccaaactgccggaagaatcactggatgtggacgtcgctgcggatttctacgggtctcagggtacctttgacttgtgccagaaacacgtgaaagcacagggcatcctgctgcctgttggccttcaagacccgaaaataactttcgaccttaaccacctcgcttttcgtgagtacaccatcattggcaacttctggggtacctcccaggatcagactgaagtcttcgaactggtaaagaaaggcctagttacaccgcaggttgaaactacgtcttggttgaacgtcaacaaagtactgaaggatctggatgaaggtaaaatcaaaagcagaatggtcctggttcataatgaagacaac

SEQ ID NO: 613 - DNA, 1023 bp, Artificial Sequence
  Synthetic polynucleotide
atgaaggcgctgtcgaaattaaaagccgaagagggcatctggatgaccgacgtcccggaaccagaagtgggtcacaacgatctcctgattaaaatccgtaagacagctatatgcgggactgatgttcatatctataattgggacgagtggagtcagaaaacgattcctgtacccatggttgtcggtcacgaatacgttggcgaagtagtgggtatcggccaagaagttaaaggcttcaacatcggtgaccgcgttagcggtgaaggtcatattacctgtggccactgccgtaactgccgagggggccgcactcatctgtgtagaaataccaccggagtgggtgtaaaccgtccaggatgctttgctgagtaccttgttatcccggcattcaacgcgttcaaaatcccggataacatttcagacgatttggcttctatttttgacccgttcggcaacgcagtacacactgcgctgtcttttgatttggtgggtgaagacgtcctggtcagcggcgctggtccgatcggcgttatggctgcggccgtagctaaacacgttggtgcacgtcacgttgtgatcactgatgtaaacgaataccgtttagagctggcccgcaaaatgggtgtgacccgtgcggttaatgtggcaaaagaatcgctgacggacgtgatggctgaactgggcatgactgagggattcgatgttggcctggaaatgtctggtgccccgcctgcttttcgcactatgctagacaccatgaaccacggtggccgtatcgcgatgctgggtattccgccagctgacatgtccatagattggacaaaggtaatcttcaaaggcctattcatcaaagggatctatgggcgcgagatgtttgaaacttggtacaagatggccgcactgattcagtccggtctggatttgagcccgattatcacccataggttctctattgacgatttccagaaaggcttcgacgcaatgcgttccggccaaagcggtaaggttatcctgtcttgggat

SEQ ID NO: 614 - DNA, 1047 bp, Artificial Sequence
  Synthetic polynucleotide
atgtgcaaccagcaccaaactagagtattgagtgtcagccatgcgaaagccaagttcgagcagaccacgattgaacgccgtggcctccgtccgcacgatgtgcttattgacatcaaattttctggtatctgtcattccgacatccactctgcattcgatgaatggggtgggggcatctttcctatggttccgggtcatgaaattgctggcgttgttactgctgtaggtaccaaagtgaccaagctagcagtcggcgaccgtgttggtgtaggctgcttcgttgattcgtgcggagagtgcgaatactgtctgaatgctgaagaacagttctgcacaaaaggcgtggtacaaacttataacagcgttgattacgacggtaaccccacctatggcggttactcacagaaaatagttgtaactgaccgctttgtcgtgcgtatcccagatcggttagagatggatgtagcgtccccgctgctgtgtgctggtatcaccacctactccccgctgaaacactggaacgtgggaccgggtaagaaagtcgccatcgttggcgttggtggcctgggtcacctggcaattcagttcgcgcacgctatgggcgctgaagtaactgttttaagccgctccatgaataaaaaagaagaggcacttgaactgggggcgaaccactattttgccacatctgaccctgcaacgttcactgctctggctggtaggttcgacgtcatcctgaacaccgtgtctgcgaatctggatgttgacgcgtacctgtctatgctgcgtattgatggtaccctcgttagcgtaggcgcgccagcaaagccggacacttattcagtttttagcctgatcatgggacgccgatccatagctggctcgttggtgggcggcatccaggaaacgcaagaaatgctggatttcgccgctgagcatggtattgaaccaaaaatcgaagttatcggcgcagatcaggttgatgaagcctacgagcgtattctgcgttctgacgtccggtaccgttttgttatcgacatttctacgctg

SEQ ID NO: 615 - DNA, 852 bp, Artificial Sequence
  Synthetic polynucleotide
atgccatacgcggtaaaatcttatgccgctcactcaccgactagccgcctcggtctgttcgagtgtgaccgtcggtcgcctcagccggatgacgtcgttatcgaaattctgtactgcggcgtttgccattccgatgtgcacaatgtgcgtaacgactgggggtctgctcaatatcccatggttccgggccatgaaatcgtaggttgcgttttggaagttggtagtgaagtaacacgctttaaggcaggcgatcacgtgggtgtcggctgtatggtagagtcctgccgtcactgcaacgcgtgtggaaaaggctgggaacagtactgcgaaaacggcgcaacctacacgtataacggtaccgacccgattgatggtactcgtacttacagcggctacagcgagaaaatcgtggttgctgaacacttcgtcttaaaagttcctgatggtctggacctggcaggtgctgcgccgctgctgtgtgccggcattaccacctattctccgctgcgacattggaaagtagggccaggatctaaggttgcaatcgtaggtcttggcggtctgggtcatatgggcctgaaacttgctaaagcgatggggactgaagtcacactgttttctcgctccccgggcaaagaggctgatgcgcgtcgtctaggcgcagaccacatagttatgagtaccgacactgctcagatggcggctgctgtggatgggatcgatgctatcgttctgactcacggttccgacggcggtggtcatggcgcctgcgcccgtgctcgccgcccgggtgctgcgttaggtcgtcgtacgttcttcagcccgccggaccctagcctgcgccgcttgcac

SEQ ID NO: 616 - DNA, 1071 bp, Artificial Sequence
  Synthetic polynucleotide
atgtcggcgacgatgaaagcttgggcagtcgtggaaaacggtgccccactcaaggagatcgacttgccgatgccggaacctaccggccgtgagattcttctggaagttacacactgcggtgtttgtcatagtgatctgcacctgtgggatgggtactatgacttaggcagcgctggtcgctacgaaatcgtacaacgtggcattactctgccgctggctctgggccatgaaatcgtaggtagggttgtgaaactgggacccgaagcatccggtgtcaaagttggggacgtacgcatagtgtatccgtgggtcggctgcggcgagtgcgcgcggtgcaaggccggtgaagataatttatgtgcaaaacagcgttcactgggtatctaccagcacggcggctacgcgacccacgttatcgctgcgcacgctggtcatcttgttgatccgggagacctggaccctgcactggctgcgacttatgcctgttctggtattaccgtctacgctgcaatccgcaaagtaatgccgctgcccgcggataccccagtggttctcatcggcgctggtggtctgggcctgtctgccattgcagtgttgagagctttaggccacaaagctattgtttccgtagacactagcgcccgtaagcgtgaagccgcgctggcagctggggctactgccgttgtagatggtaacgacccggctctgcataaagctataatcgcagcatgcggtggccagccggaagcgatcatcgatctagtcaacggttcgggtacggcgaaagcagctcatgcagctctggcgaaaggcgggaaactgatcatggttggcctatttggtggcgagctgaatattccgctgccgttcatgccaatgcgtgctctgaccctgcaaggaagcttcgtaggcactccgggtgatctgcgagaacttgtggatctggctcagggtggcgccctgcctaaactccagatcgaaactgttccccagcgtgaggccgacgctgccatccaccgtttgaaggcgggagacgttactggacgcctcgttctggtagctgacggcgct

SEQ ID NO: 617 - DNA, 1119 bp, Artificial Sequence
  Synthetic polynucleotide
atgaacgacacgcaggattttatctcagcccaagcagcggttctgcgccaggtagggggcccgttggctgtcgagcccgtgcgtatttccatgccaaaaggagacgaagtactgatccgtattgctggcgttggtgtttgccatacagatctcgtgtgtcgggatggtttccctgttccgcttccgatcgtactgggtcacgaaggctctggtactgttgaagcagtcggcgagcaggtacgaaccctaaagccgggcgaccgtgttgtgctgagcttcaatagttgcggtcactgcgggaactgccatgacggtcacccgtctaactgtctgcaaatgctgccattaaactttggaggcgctcagcgcgtggatggtggtcaggtcctggacggcgcgggccacccggttcagtccatgttcttcggtcagtcttcgtttggcacccatgcggtggctcgtgaaataaacgcagttaaagttggtgacgatctgcccctggaactgctgggccctctggggtgcggtattcagactggcgctggtgctgccatcaatagcttaggtatcggcccgggccaatccctggcgattttcggtggtggcggcgtcggtttaagcgccctgctgggtgcgcgcgctgtgggcgctgatagagtagtagttatcgaacctaacgcagcacgtcgtgcactggcgttggagctgggtgctagccacgccctagacccgcatgctgaaggtgaccttgtggcagctatcaaagctgcaactggaggaggcgccacccactctctcgataccactggtctgccgccggtaatcggctcggctattgcgtgtacgctgcctgggggaaccgtgggcatggttggtctgccagcgccggatgcaccagtaccggccactctgctcgacctattgagcaagtctgttaccttaaggcccattactgaaggcgacgctgatccgcagcgtttcatcccacgtatgctggattttcaccgcgctgggaaattcccattcgaccgcctgatcactcgctaccgttttgaccagattaacgaagccctgcatgctaccgagaaaggggaagcaattaaaccggttctggtcttt

SEQ ID NO: 618 - DNA, 1023 bp, Artificial Sequence
  Synthetic polynucleotide
atgaaggcggtgcgctttttcgggcacaaagacgtccgggttgtaaatgatattgagcgtccggttccaaaaggcgacgaagtactcttgaaaatcggtggcgccggtgtgtgccattctgatttacacatcattgacgaaggtacggttgtaggcactgttttcaccctgggtcatgaaaacgctggctggatcgaagaggttggcgaaaacgtcgaaggttataaaaagggagatgctgtgctagtctacggtccgtggggctgtggccactgcaaaccttgccagcaatcgaaagagaactactgtgaccaccagagcgaacaggcatacgggggtggtctgggccttgatggtgggatggctgattatatgctggttccctccagtcgtctgctggtgccgatattcgacctggatccggtaatcgcagcgcctttgactgacgcagctctgacaccgtactcagcaatcaagcgttccctgcctaaactgatggcggacgaatacgtggttgttattggagtaggcggtctgggtcacgttgcccttcaaatcctgcgcgaaattagcggcgctgagatcattgcctgcgatgtgaccgaagacaaactggcttttgcgaaacagctgggtgcggcttatgtgatcaattctaaggacgcagatgcgactgaacagatccagaaaattaccggcataaaaaaggctaaagttgtgctcgatttcgtaggtgccacctctactatcgatctgggcactaaagtagttagcttagacggagacctgaccattgtcggcctgggcggtggtcattatcagtactctatgaacggtctgccatttggagtttccatgacgaacccgtactggggctcccgtactgagctgatggaagttgtagggctggcccgccaaaagaaaattcacatcgaaatcgaaaaacacaaattagatgacgctaacgaagtttatgagcgtatgcgccagggtaaaatcaaaggcagagctgtcctgattccg

SEQ ID NO: 619 - DNA, 1089 bp, Artificial Sequence
  Synthetic polynucleotide
atgggcgagccgttcactcaaatcgacgcctggtatagcaatgatccccagaaaccgctgcaatttggtaagcttgacgcaaaacctatagaagattacgacattgatgtaaaagttttgtactgcgggttatgttcatccgacgttggcgtgctctcgggtgcttacggtccagtccatgaagaagtatgcggccacgaaatcattggcaccgttacacgtgtcggtccggaggtgaagcacctgcgcgttagtgatcatgttggagtgggtggccagtgcgactgttgcacgcactgcccggcgtgcgaacgtggagatgagcatatgtgcccgggcctgaccttcactattggcatgatccagggtccgtataaacgaggtaaagctaaaggccgcctgggtcagggtggctttgcgaagcagtggcgtggtaacgctcgtttcgccttcaaaatcccagacggcgtagaactggcatctgctgggcctctgttttgtgcaggaaccactgttttcacgccgctgcgtaggtttggcgctggtaaagaacgcaaccgcgttggtgtgatcggcctgggtggtctgggccacctgggtattcagctagcggctgctctgggtgcggatgttaccgccatcagccgtggtaactccaaggaggaagacgcccgtaaactgggcgcaaaacactacatcgctactggctctgatctgaaaaaagacttcgaaaaacatcaaggtagcttagacctgattatctgcactatcaatccgccggatcttgatgtcgacgcttatttcacccttctgtctgcgggcggtcttttcgtacctctggggataccgcacaagccactcgtaattgacccgatcggcttgatcctgggccagaaaggtgtggttggtagcgcgttaggcgcacctcaggatattaaagcactgctggaactgtgtgcgaaaaccggtgttaaaccatgggtacagctgtgggaattttctgatatcaacaaggccatcgaagcattcaaccgtggggagccccgctaccgcttcgttttggtgaacaccgacaacggcggtgaactg

SEQ ID NO: 620 - DNA, 1116 bp, Artificial Sequence
  Synthetic polynucleotide
atgccacagaagatcaaagctagcattgcctacggcatcggtaaagggttcgcacaaccggaggaaataattatcgacgatcccatcggtgcggaagtcctggtagatgtgcaggcttctggcttatgccactccgacctccatctggttgaagacgatgacaaatttttcccttttccggcagttatcggtcacgaaatttcaggcatcgtagaggctgttggcccggaagtgtcgggtatcaaagtcggtgatcacgttgttgccagtcttgaacaggtgtgtggacattgcgcgaactgcctgaagggccagccgcagtcctgcacccagcaacaggagtgtgtacgtggcgctggagaaaaaccacgcctgtctttcccggacggtcgtccgatcacgcaggcattcggtactggtgggttcgcggaaaaagctttgattcacgagaatcagctggccgtagttaacaaccaggttaaatgggatgaagctgcatgcattggctgcgcgacaatcaccggggcaggcgctgcgattaacactgcccatgtccggcctggtgatactgtggctgtcatcggtaccggcggcatcggactgaatattatctcgggtgctcgcatctgcggtgctaagcgtattatagcaattgacctgctggacaacaaattggaatttgcgcgcaaatttggcgcgacggatgtggttaactccaagaatgaagacccggttgctaaagttcgtgagctcaccgatggtggcgtggataaagctttcgaggccatcggtcttccggtaactatgaaacaagcgtgggacatgctgggcgtaggtggcaccgcttatccaatcgggctgacaaagccggacgcaactgtctctctggaaatcaaccctgccgatctgctggttcaccagaggggtttcaaaggtgtgtggatgggtagcaccaacatcaaacatgacatcccgatgtacgctgattttgcagtcgacggccgtctgaacatgcacgatatagtgagccaacatatcaaattgtctcagattgatgaagcatataaacaattagtaaacggcgaggttatccgtagcgttattactgaatttgac

SEQ ID NO: 621 - DNA, 1062 bp, Artificial Sequence
  Synthetic polynucleotide
atgaagtgctactgtttgaataaattccttacacccctgaaaaaacaagagattgacacgccgactccgtccggcgaagaagtactgctcaagatcaaagcgtcaggtatatgccactctgatattcatttttgggaagggtattacgatatcggcgaagacaaaaaactggagttaaaagaccgtggtatcaagctgcctatgatcctgggtcacgaaattgtcggcaccatcgtgctaaaaggcagtgatgttatcgatctggaaatcggtgacaactgcatcgtttatccgtggatcggctgcggtaactgtgaaagctgcaacattagccaggagaactactgtgttaatcctagatacctcggtattcagcgctctggcggcttcgccgaatacgtgctggtaccgtcctataaatacctgattgatatcaaaaacaataacccggttaccactgctcagtacgcatgctcgggtctgactacttactctgctatcaagaaaatcgaccagtccatctataccaagaaaccgattgtgatttttggtgcaggaggcctgggtcttaccgctatcagcatcttgaaagcgcttaactctttcggcgtcctggttgttgagaaagacgaatctaagcgtaaagcggctttaaaagcaggggcactggacgtctttgatctgttcgatgaaaacctggagtccaagctgctggaatacaacaacggcaacaaatataaagctgtaatcgatctgatcggtaacaacttgacatctcgcataagcttcaatgttctggataaattcagcaccctggttatcgtgggtatgtttggtggcctgtccagctggccaattgccctgataccaatgaaagctattaaaatcatcggctcgtatgtagggaacctgaacgaattttacgagctgatggacctggttataaaaaataaaatcactccgactccggtccaggcctaccatttcgatcgtattaacgaagcgatggacgacttacgtaccggcaacgtgatcggtcgtgcggtacttgttcacgactct

SEQ ID NO: 622 - DNA, 927 bp, Artificial Sequence
  Synthetic polynucleotide
atggtaatggacggcgtttttaacgcacctctgccactcattgggtcacacgaaggtgcgggaaccgtgactgccgtcggttcggctgttgagaatttcagcatcggtgatcgcgtaatggctcatgtgcgtcgtaacacgtgtggcgaatgcagtgaatgcttaggtccggatgtttggaaatattgctgtaccgcaccgcgcgactctcttggcatcactacagatggcgcgttcgctgagtacctagtcgctgactctcgttggagcgttaagctgccgaaaggttttcccttcaccgtagcggccccgctggcttgcgcaggcgccaccagcttccgggcagtgaaaatggctgggctggaacgtggccagtggttggcgatcgttggttccggcggcggtctgggacacctgtctatacactttgctaaacatcgtggtctgaacgttatcggtattgacgcgcgcgatgcaggcctggctttatccctgcgatccggtgcagaccacgtgctggatgcgcgcaagggtaaagatagaattgtaaatcaagtccagtctctcactaaaggccgtggcgttgacgccactatcaacctgtctgacgctggctccgctgcgagtatgagctgtgcgatcactaggattcatggtacggtgtggcaggtggctcaaccgcgtgatgttgctgtaccgtaccaggaactggttctgagggatatccgtctgcgtggttccgttatttgctctccaatggatgcccaggaaatgatcgcaaccgtcgccggtatgggcggtgacatcgtagctgtgcgtacatacgttggactggaatcgcttcctaagctacttcaggacgtgagagcccacgacgctgtcggtaaagcgatcatcgttgtagaccgcgcacaggttacccaagct

SEQ ID NO: 623 - DNA, 1062 bp, Artificial Sequence
  Synthetic polynucleotide
atgtcgagcagttccattttgtcaggccgtgcagccatcatcagggaagtaggtctgaagacggttatagagaccgtgcccgcgcagaaacaaccatctgaactcttaccgggggaatgtcttgttaaactggaatattccggtgtatgccacagcgatctgcattttatgctgggcgagttcgctccgccgtctctgcctactgtcggtggccacgaaggtgttggccatatcattgctatcggtgaacagtctgaccgttgccgcttccgcgtgggagacaaagtaggcatcaccctgctggggagtacatgcatgcagtgtgagctgtgcctgagcggcaaagaacaatactgtgcgaagtttaaaactctaggtttcgaagcttggggtaccttctccgagtacgtggttgcacacacagattatgttgtcccaattcctgccaacttgccgagcccggtagcaactccggtcctgtgcgctggtgcgactgtttactctgctctgaaaaattccatgagctctgtgggcgactggctggctgtttctggcgcaggtggcggtttgggacacctggccatccagtacggcgttgcgatgggtctacgtgtaattgctatcgataccggcgaagagaaaaaaaacctgtgcctgagcctgggagcagaacagtggatcgactataaagaatcaagtgatgttatcgccgatgtcagagctgctgcgggtggcgttggtccgcatgtggcgttaattgctatcggatcacacgctccttacctccaggcgtccctgtaccttcgcccgatgggccgtctgctgtgtgtcggcctgccatcgggcccgctgaacgggctgttgctcactccgttcgcagtacgtggtataaagctgatcggttcggttttaggcagccgtaaagaaattgtggaagctcttgacctggcagcccgcggtaaggtaaccccccattttgaagttcgtccgcacgctgaaatcaatgatgttctggagcgaatgcataaaggcctgctcgttgggcgtgttctgctgaaatat

SEQ ID NO: 624 - DNA, 1095 bp, Artificial Sequence
  Synthetic polynucleotide
atggcaagcagtacaactaatgggtccaactcagtcccggctacgcaaaaggccgcgcagttcaacccatctgaccagtctgtaagcattaacgagatcccggttcctagcatcaaaccctatgaaatcctagttaaagtgaaagcagcttccctgtgtcactctgatctgatgttatttgaagaaaacgagcagggtctcaaacttggctcgggtgaaccgttcactatgggccatgaaggatgcggtaccattatagaagttggctcggaggtgggcgacaacttcaagccgggtgatcgcatcggttggctgccgatcgtagactgctgctacgattgtgaagaatgccagattcacaacttgtactgcgagaaaggtacctccaaagtccaaggcatgaccgttgacggctattttcaggaatacgctgcgattaattggcgtaacgctgcgcacatcccagatggcatggacctggccaatttagcaccgctgttctgtgctggttgcactgcttttaacagcgtgactgacaccatcgctgaacttaaaggcatccccgaagaaaactgggttgccgtagttggttgcggtgggctgggtcatctgggcattcagtacctgaaggcgttcgggtataaagtgatcggtattgatctgtccgcagacgctgttgaggaagcactggctcagggcgcggatcacgtctttaatccgatgaaatgcgcggattacatcgatcaagtgcgtcagatcactggcggaaaaggttgtcacgcagtaatcaactataccaactctgtaccggcttactctaacgcagttggcctgctccgaatgaatggagttcttatggtgacggggattccgcagaaacctttgcagttcagcgccatggacgtatcaatgaagcgtatacgcgttagaggctctaacaacggtacgactcctcgtctgaaaaagtgtgttgaattttcgtacaaacatggtatcgagccgcacgtcacccagttcaaacttgaagagttcccaaaaatggtggaactaatgaggtccaaccgccataaaggccgtttaggtgtgctgttccag

SEQ ID NO: 625 - DNA, 1065 bp, Artificial Sequence
  Synthetic polynucleotide
atgacaccggagcagattcctcaaacccagaaggccgcggttgtgcgcaacaaacaggtagcaatcgaaactgtcccagttgtacagcccgcggacttgaaaccgaatgaagctctcgttaaagttctgtactctggcgtgtgtcacactgatctgcatgctcaattaggggattggccgctaatccacaaagaaccgctgattggtggtcatgaaggcgctggtatcatagtagcaatcggcgagcactcagacacggatcttaaactgggcgaccgtgtcggaatcaagtggctggcggacagctgcctgaaatgctcgtattgccgtcagggctacgaaccgctgtgtcaccatgcactgtgctctggtttctccgttgatggtagctttcagcagtacgccgtgagcttcacccgccacctgactaaaattcctaaagaactgccgatggacaaggctgctccaatcctgtgcgctggcgttactgtgtataaagcactgaaacagagtaacgcccgaccgggtgagtgggtggttctgcccggcgctggtggcggtcttggtcatctggcggtccaatacgctcactacatggggttgcgttgtatcgcagttgataccggcgcggaaaaaaaggccttatgcgaacgtctgggggcggagcgctggattgattttaaagaaaccaaagacatcgtggctgctgtaaaagcggctaccccagatggtgacggtccgcacgctgcaatcgttacatcttccgtaggcgccgcttatgaagaagccctgcaatacgttagaccgcatggcactgtcgttgccgtcggactacccccggacgcgaaggttagcgcagatgtattctggacggtattccttgagaagcagctgaaaggttcatatgttggaaaccgtcaggacgctatagaagctctcgaaattgcggcctctggtgcgctggaaacctcttttcgtactctgccgctgaaagatctgccttccgtttacgaccagctgcacgctggctcgttggttgggcgcgttgtgctggatctgtgggct

SEQ ID NO: 626 - DNA, 975 bp, Artificial Sequence
  Synthetic polynucleotide
atgcagtactatcaaatgatgaaggcattgcgcatgctgaaaaaaccaaaacctgggtgcctgggtatcgaaattcagtccgtaccgatcccgcagcccaagaatggtgagctactcgttaaaattgaagcggctgccatcaacccgtctgacctgatgaacgctactggaggctttccgtacaccgtgtatccgcgtatcgttggccgtgattacgctggtacggtcataagtggcgcaagccatcttgtaggtacacgcgttttcggcacttcaggttctgaactgtcgttcaccaaagacggcactcacgcggaatactgtatcattccggagaaagccgctgtgcgtatgcctagcaacttatcttttaccgaagctgcgtccgtcggcgttccattcaccactgcgtatctggctctgagccgaggtgaaactaaaggttccgatattgtgctggttgtaggagcactgggcgccgtcggttctgccgtatgccagatcgcagaggactggggttgcaaagtgatcaccgtttcgcgttcaggctccactgatatcaacaccgttgttgacccggaactgaaacgtgtacacgaacttgttgagaaggtggatgttgtgattgatacggtcggtgacccgctgctgatgaagtctgctctcaatcaactgggcatcgggggtcgcctgagctacatatcggcaccaaaacagggctccatcgaatttagctacgatatgaaacagatctatagaaagaacctgaaaattatcggttgtaactccttgctgttgagcctggttgaatccaattctctgcttaaaaacatggtggcgaagttcgaagcgggcaaatacaaagtgctgaacaaaaaaatcgcagagacctctctcacggacgaatgcatcaactcataccgtaagttgatgaatgaatgtagcactaaattcgtgattacaatgtctactaac

SEQ ID NO: 627 - DNA, 1050 bp, Artificial Sequence
  Synthetic polynucleotide
atgtcgatcccgacaatgcaatgggcacaggtagccgagaaagtgggcggtcctctggtctacaagcagattccggttccaaaaccggggccggaccagatattggttaaaatccgctattccggtgtatgccataccgatctccacgctatgatgggccactggcctatccccgttaaaatgccgctggtgggtggccatgaaggcgctggtattgttgtcgcgaaaggagaactggttcacgaatttgagatcggcgatcaagctggtattaagtggcttaacggatcatgtggcgaatgcgaattttgccgtcagagtgacgatccgctgtgcgcacgtgcgcagctgtctggctacactgtagacggtaccttccagcagtatgccctgggcaaagcaagccacgcttccaaaatcccagcgggtgtgcctttagatgctgcggctccggtgctgtgtgcaggtatcacggtttacaaaggtctgaaagaagccggcgtaagaccggggcaaactgtggcaatcgttggggctggcggtggtttaggcagcctggcccagcagtacgctaaggctatgggtattcgcgttgtggcagttgacggcggtgatgaaaagcgtgcgatgtgtgagtctcttgggactgaaacctacgtagacttcacgaaatctaaagacctggttgctgatgtaaaggctgcgactccggatgggctgggtgcacacgctgtcatcctccttgcggttagcgaaaaaccattccaacaggctaccgagtatgtccgttctcgcggcaccatcgtagccatcggtctgccgcctgacgcatatctgaaagctccggtcattaataccgtggtgcgtatgatcactattaaaggaagttacgttggtaacaggcaggacggcgttgaggctttggacttctttgcccgcggtctgattaaagctccgttcaagactgcacccctgaaagatctacccaaaatctacgaactgatggaacagggccgtattgccggccggtacgtcctggaaatgccggaa

SEQ ID NO: 628 - DNA, 1065 bp, Artificial Sequence
  Synthetic polynucleotide
atggcagcgacgggccaaaatctggccgtcgtggttcaccgtgctggtgacttgcggctggagaaccgccctatcccagaaccggggcccaacgaagttctgcttcgtatgcattcagtaggtatttgcggctctgatgtacactactggcagcacggtcgcatcggcgactttgttgtaaaagatccgatggtgttaggccatgaagcttcgggtactgttattaaggtcggagcaggtgtgacccacctaaaaccgggcgatcgtgttgctatcgagccgggggtgccgcgtgaaacagacgaattttgtaaaaccggtagatataacctgagcccaactatattcttctgcgcgacccctccggacgatggcaatctctgccgctactataagcacagtgccagctactgttacaaactgccggattctgttactttcgaagagggtgcgctgatcgaaccgctgtccgtaggcattcatgcttgcaaacgtgccggtgtcaccctgggctctcgcgtgttcgtttccgggtccggccctatcggtctggtaaacgttatcattgcaaaaatgatgggtgctgctgcggttgtggtcactgacctgtccgcgagtcgtctgcaaacggcaaaggaattaggtgctgactttactatccagatcaaaaacgaaaccccgcaggaagtcgccgcgaaagttgaatctttgctgggttgcatgcccgagatcactgtagaatgcaccggcgtacaggcttgtattcaggcaagcatttacgctacgcgatcaggcggcaccctggttcttgtgggcctcggaccggagatggttacagtccctatcgttaacgcggcagtacgtgaggtggatatccgcggtatattccgttattgcaatacttggcccgtggctatttctctgctggcatcgaaacgtatcaacatcaaaccacttgttacccaccgcttcccgctggaaaaagctcttgaagcgttcgaaactactaagcgcggtgaaggggtcaaaatcatgctgaaatgtgatccgacggaccagaacccg

SEQ ID NO: 629 - DNA, 1140 bp, Artificial Sequence
  Synthetic polynucleotide
atgtcgaacacggcaggtcaagtgatcaaatgccgcgcggctgtagcctgggaagctgggaagcccctggttattgaggaagtcgaagttgcgccacctcaggctggtgaggtgcgtttaaaaatcctcttcacttccctgtgtcacaccgacgtatatttttgggaagcaaaaggccagaccccgctgttcccgcgtatctttggccatgaagctggtggcattgttgaaagtgtcggtgagggcgttactcacctgaaaccgggtgatcatgcactgccggtgttcacaggagaatgcggcgagtgcccgcactgtaagtcagaagaaagcaatatgtgcaaccttttgcggattaacaccgatcgtggcgttatgatcaatgacaacaaatctcgattcagcatcaaaggtcagcctgtgcaccattttgtaggtacttctaccttctctgagtacactgttgtacacgcgggatgtgtcgctaaaataaacccggacgccccactggataaggtttgcatcctgagctgcgggatttgcactggcttgggtgcaaccgtcaacgttgcgaaaccgaaaccgggttccagtgttgcaatctttggcctgggcgctgttggtctggcggctgctgaaggtgctaggatgtctggcgcgagccgcatcataggtgttgacctggtgtcctctcgcttcgaattagcaaaaaaattcggggtaaacgaatttgtcaatcccaaagatcatgacaagccagtacagcaagtgattgccgagatgaccgatggtggcgttgatcgtgccgtcgaatgtacgggctccatccaggctatgatctcagcgttcgaatgcgtgcacgacggttggggcgttgccgttctggtgggcgtaccaaagaaagacgatgcatttaagactcatccgatgaacttcctgaacgagcgtactttgaaaggtaccttctacggtaactataaaccgcgtactgatctgccgaacgtggttgaacagtacatgaaaggcgaactggaactcgaaaagttcattacccacagcattccgttctccgaaatcaataaagcgtttgactacatgttaaaaggagaatctatccgttgcatcatccgcatggaagag

SEQ ID NO: 630 - DNA, 1137 bp, Artificial Sequence
  Synthetic polynucleotide
atggcaacggcgggcaaagttatcaagtgtaaagctgccgtcgcgtgggaggctgggaaaccgttgagtattgaagaagtagaagtggctccaccgcaagcgatggaagtacgcgttaaaatcttatacacctctctctgccatacagatgtgtatttttgggaggctaagggtcagactcctgttttcccgcgtattttcggtcacgaagcaggcggtatcatcgaatcggtcggcgaaggagttactgacgttgcacccggtgatcacgtgctgccggtattcaccggcgagtgcaaagaatgcccgcactgtaaaagcgccgagtccaacatgtgcgacctgctgcgtatcaataccgtgcgcggtgttatgattggtgatggcaaatctcgatttagcataaacgggaaaccaatttaccatttcgttggcacttctactttttcagaatacaccgtcatgcacgtaggctgcgttgctaaaattaacccggaagcccccctggacaaggtgtgtgtactgtcctgcggtatctccacgggtctgggtgctagcatcaacgttgctaagcctccgaaaggctctaccgtggccatcttcggtcttggcgcagttggtctggcggcggcagaaggggctcgtatcgccggtgctagcagaatcatcggagttgatctgaatccgtcccgtttcgaggaggctaaaaaatttggctgcactgaatttgtcaacccaaaagaccacaacaagccggttcaggaagttctggctgacatgaccaacggtggtgtagatcgcagtgtagaatgcactggcaacattaatgcgatgattcaggccttcgaatgtgtgcatgacgggtggggagtagcagtcttagtgggcgtaccgcataaggacgcagaatttaaaactcacccgatgaacttcctgaatgagcgtacccttaaaggcacattcttcggtaacttcaaacctcgtactgatctgccgaacgtggttgaactgtatatgaaaaaagagctggaagttgaaaagttcatcactcactctgttccattttcggaaattaacaaggcgttcgacctaatggctaaaggcgaaggcatccgctgcatcatccgtatggaaaac

SEQ ID NO: 631 - DNA, 1140 bp, Artificial Sequence
  Synthetic polynucleotide
atgtcgacgacagtaggtcaagtgatccgttgcaaagcggctgtcgcctgggaagcagggaagcccctggttatggaggaagttgacgttgcgccacctcagaaaatggaagtgcgcttaaaaattctctacacttccctgtgtcacactgatgtatatttctgggaagcaaaaggccagaatccggtatttccgcgtatcttgggtcatgaggctgctggcattgttgaaagtgtcggtgagggcgttaccgaactgggtccgggcgaccacgtgctgccggtgttcaccggcgaatgcaaggattgcgcacattgtaaatcagaggaaagcaacatgtgctctctgttgcggatcaacaccgatcgtggtgtcatgatcaacgacggacagtcccgattcagcatcaacggtaaacccatataccactttgttggtacttctaccttctctgaatacactgtagtccacgtaggctgtgttgctaaaattaatccgctcgccccgctggacaaggtttgcgtgctgagctgcgggattagcactggccttggtgcgaccctgaacgttgctaaaccaaccaaaggttcctcagttgcgatctttggcctgggcgctgttggactggcagccgctgagggtgctaggatcgctggtgcgtcgcgcatcataggtgttgatctgaacgcctctcgcttcgaacaagcgaaaaaatttggggtcaccgaatttgtgaatcctaaagactattccaagccggtacaggaagtaattgcagagatgacggatggtggcgttgatcgtagcgtcgaatgtaccggccatatcgacgctatgatctctgcgttcgaatgcgtgcacgacggctggggcgttgccgttctggtgggcgtaccacacaaggaagccgtattcaaaactcatccgatgaaccttctgaacgagcgtactttaaaaggtacgttctttggtaactacaaaccgcgttctgatatcccgtccgtggttgaaaagtatatgaataaagagctggaactagaaaagttcattactcacaccttgccattcgcagaaattaacaaagcgttcgacctgatgttaaaaggagaaggcctgcgttgcatcatcactatggaagac

SEQ ID NO: 632 - DNA, 1140 bp, Artificial Sequence
  Synthetic polynucleotide
atgtcgacgacagtaggtcaagtgatccgttgcaaagcggctgtcgcctgggaagcagggaagcccctggttatggaggaagttgacgttgcgccacctcagaaaatggaagtgcgcttaaaaattctctacacttccctgtgtcacactgatgtatatttctgggaagcaaaaggccagaatccggtatttccgcgtatcttgggtcatgaggctgctggcattgttgaaagtgtcggtgagggcgttaccgaactggctccgggtgaccacgtgctgccggtgttcaccggcgaatgcaaggattgcgcgcattgtaaatcagaggaaagcaacatgtgctctctgttgcggatcaacaccgatcgtggagtcatgatcaacgacggtcagtcccgattcagcatcaacggcaaacccatataccactttgttggtacttctaccttctctgaatacactgtagtccacgtaggctgtgttgccaaaattaatccgctcgccccgctggacaaggtttgcgtgctgagctgcgggattagcactggtcttggcgcaaccctgaacgttgccaaaccaaccaaaggttcctcagttgcgatctttggcctgggcgctgttggtctggcagctgctgagggcgctaggatcgctggtgcgtcgcgcatcataggtgttgatctgaacgcctctcgcttcgaacaagcaaaaaaatttggggtcaccgaatttgtgaatcctaaagactattccaagccggtacaggaagtaattgcggagatgacggatggtggcgttgatcgtagcgtcgaatgtaccggccatatcgacgctatgatctctgcgttcgaatgcgtgcacgacggttggggcgttgccgttctggtgggagtaccacacaaggaagcagtattcaaaactcatccgatgaacttcctaaacgagcgtactttgaaaggtacgtttttcggtaactacaaaccgcgttctgatatcccgtccgtggttgaaaagtatatgaataaagagctggaactcgaaaagttcattactcacaccttaccattcgctgaaattaacaaagcgttcgacctgatgttaaaaggagaaggcctgcgttgcatcatcactatggaagac

SEQ ID NO: 633 - DNA, 1011 bp, Artificial Sequence
  Synthetic polynucleotide
atgaaggcggcagtaattactaaagaccatacgatcgaggttaaagataccaaactgcgcccgttgaagtatggcgaagctctcctggaaatggaatactgcggtgtttgtcacaccgatcttcacgtgaaaaatggggactttggcgatgagacaggtcgtatcactggacatgaaggtattggcatcgtcaaacaagtaggtgaaggcgttacttctttaaaagtcggtgaccgtgctagcgtggcctggttcttcaaaggctgcggccactgcgagtactgcgtttccggtaacgaaaccctgtgtaggaacgttgaaaacgcgggttacacggtggacggcgcaatggctgaagagtgcatcgtagtagcagattattcagttaaggtccccgacggactggatccggctgtagctagctcgattacttgtgccggtgttaccacctacaaagcggtgaaagtgtcccagatccagcctggccagtggctggcaatctatggcctgggtgggcttgggaatctggctctgcaatacgcaaaaaacgtttttaacgcgaaggttattgctatagacgttaacgatgaacagctggccttcgctaaagaactgggtgctgacatggttatcaacccaaaaaacgaggacgcagcgaaaattatccaggaaaaagttggcggcgcgcatgcaactgtcgtcacggctgtggccaagtctgctttcaattctgcggttgaggccatccgcgcgggtggtcgtgtggtagccgtaggtttaccgccggaaaagatggatctgtcgataccgcgtctggtacttgatggcatcgaagtcctcggaagcctggtgggcacacgcgaagacttgaaagaggcatttcagttcgccgctgaaggtaaagtgaaacctaaggtaactaaacgtaaagtggaagaaattaaccaaatctttgatgaaatggaacacggtaaattcaccggccgaatggtcgttgatttcactcaccat

SEQ ID NO: 634 - DNA, 1146 bp, Artificial Sequence
  Synthetic polynucleotide
atgtcgagcaacacagctggtcaggtaattcgctgtaaggccgcggtcgcatgggaggctgggaaaccgttggtgatcgaagaagttgaagtggcgcctccgcaaaaaatggaggttcgtcttaaaatcctgtttacctccctctgccatacggacgtttacttctgggaagctaaaggccagactccactgttcccccgtatttttggtcacgaagccggcggtatcgtagaatcagttggcgagggcgtcactgatttaaaaccgggtgaccacgtgctgccggttttcaccggcgaatgccagcagtgccggcattgcaagagtgaagagagcaatatgtgtgatttactgcgtataaacactgatcgcggtgtaatgatccacgacggccaaaccagattctctaaagatggaaaaccgatctatcattttgttggtacttctaccttcagcgaatacacagtgtgccactccggttgtgttactaagattgacccccaggcaccgctggacaaagtatgcgtactgtcttgcggtatctctaccggtctgggcgctaccctaaacgtggcaaaaccaacgaaaggctcaactgtggcaattttcggactgggtgctgttggcctggcggctgcggaaggtgcgcgtatcgctggggcaagccgcatcattggtgtcgatctgaatccttcccgcttcaacgacgccaaaaaattcggcgttaccgagtttgttaacccgaaagaccacggcgataaaccggtacagcaggttatcgcagaaatgactgatggcggtgtcgaccgttctgtggaatgcacgggtaacgtaaatgctatgattagcgcctttgagtgcgtgcacgatgggtggggcgttgctgtgctggtaggcgttccgaacaaggacgatgctttcaaaactcacccgatgaacctgttaaacgaacgtaccctgaaaggaacttttttcgggaactataaacctaaatctgatatcccaagtgttgttgacaagtacatgaagaaggagctggaattagaaaaatttattacgcatcaagtaccgttctccgaaatcaacaaggcgttcgactacatgctgaaaggtgaatcgatccgatgtatgattaccatggagcac

SEQ ID NO: 635 - DNA, 1140 bp, Artificial Sequence
  Synthetic polynucleotide
atgtcgacgacagtaggtcaagtgatccgttgcaaagcggctgtcgcctgggaagcagggaagcccctggttatggaggaagttgacgttgcgccacctcagaaaatggaagtgcgcttaaaaattctctacacttccctgtgtcacactgatgtatatttctgggaagcaaaaggccagaatccggtatttccgcgtatcttgggtcatgaggctgctggcattgttgaaagtgtcggtgagggcgttaccgatctggctccgggtgaccacgtgctgccggtgttcaccggcgaatgcaaggactgcgcgcattgtaaatcagaagaaagcaacatgtgctctctgttgcggatcaacaccgatcgtggagtcatgcttaacgacggtaaatcccgattcagcataaacggcaatcccatctaccactttgttggtacttctaccttctctgagtacactgtagtccacgtaggctgtgttgccaaaatcaacccgctggccccgctggataaggtttgcgtgctgagctgcgggattagcactggtcttggcgcatctctgaacgttgccaaaccaaccaaaggttccagtgttgcgatctttggcctgggcgctgttggtctggcagctgctgaaggcgctaggattgctggtgcgagccgcatcatcggtgttgacctgaacgcctctcgcttcgagcaggcaaaaaaatttggggtcaccgaatttgtgaatcctaaagactattcgaagccggtacaggaagtaattgcggagatgaccgatggtggcgttgatcgttccgtcgaatgtacgggccatatcgacgctatgatttctgcgttcgaatgcgtgcacgacggttggggcgttgccgttctggtgggagtaccacacaaggaagcagtattcaaaactcatccgctgaacttcctcaacgagcgtactttaaaaggtacatttttcggtaactacaaaccgcgttctgatatcccgtgcgtggttgaaaagtatatgaataaagaactggaactcgaaaagttcatcactcacaccttgccattcgctgaaattaacaaagcgttcgacctgatgttaaaaggagaaggcctgcgttgcatcatcaccatggctgac

SEQ ID NO: 636 - DNA, 1008 bp, Artificial Sequence
  Synthetic polynucleotide
atgaaggcggcagtagttactaaagaccatcacgtcgatgttacgtataaaaccctgcgcagcttgaaacacggcgaggctctcctgaaaatggaatgttgcggtgtttgccacaccgatcttcatgtgaagaatggggactttggcgataaaacaggtgtgattttaggacatgaaggtatcggcgtagtcgccgaagttggtccaggcgtaacttctctgaaacctggtgaccgtgctagtgttgcatggttctacgaaggctgtggccactgcgagtactgcaactccggtaacgaaaccctgtgcagatcagtgaagaacgcgggttacagcgtggacggcggcatggctgaagagtgcatcgttgtagcagattatgctgtcaaagttccggacggactggattcggccgcggctagctccattacttgtgctggtgttaccacctacaaagcggtcaaactgtctaagatccgtccgggtcaatggatcgccatttatggcctgggcggtcttgggaatctggctctgcaatacgcaaaaaacgttttcaacgcaaaagtaatcgcaatagatgtgaacgatgaacagctgaaattagcgactgagatgggtgcggaccttgcgatcaattctcacacggaagacgcagctaaaattgtacaggaaaaaactggaggggctcacgccgctgttgtgactgctgtcgcgaaagctgcttttaacagtgctgtggacgctgttcgcgccggcggtcgcgtagtcgcagttggtctgcccccggagtccatgagcctcgacatcccgcgtctggttctggatggcatcgaagttgtgggctcgctggtcgggacccgtcaggatctgacggaagcattccagttcgccgcagaaggtaaggttgttccgaaggttgctctgcgtccgttggctgatatcaacaccatttttactgagatggaagaaggtaaaattcgcggccgtatggtcatcgacttccgccat

SEQ ID NO: 637 - DNA, 1098 bp, Artificial Sequence
  Synthetic polynucleotide
atggagatcaaggcagctattgtgcgccaaaaaaatggacctttccttctggaacatgtagccctgaacgaaccagcggaagaccaggttctggtccgtctagttgctactggtttatgccacaccgatctggtatgtcgtgaccagcactaccccgttccgttgccgatggtgtttgggcatgagggtgcaggcgtcgttgaacgcgttggttccgctgtgaaaaaagtacagccgggcgatcacgtggttctcacattctatacgtgcggcagctgcgacgcgtgtctgtcaggcgatccgacttcttgcgccaactctttcggcccgaactttatgggtcgttccgtgaccggtgaatgcaccatccatgatcaccagggcgctgaggtaggagcaagcttctttggtcagagttctttcgcgacttacgctctgagctatgaaagaaataccgttaaagtgaccaaagacgttcctctggaactgctgggtccgctgggatgcggtatacagactggcgctgggtccgtattgaacgctctgaacccaccggccggttcggcgatcgcaatttttggcgcgggtgcggttggtctatctgctgttatggcagccgtagtcgctgggtgtactacgatcattgctgtggacgtaaaggagaaccgtctggaactggcctctgaactgggcgctacacacatcatcaacccggcagcaaacgatcccattgaagctatcaaagagatcttcgcagacggtgtcccttacgtcctggaaacttctggccttccggcggttcttacgcaagcgatcctcagcagtgctattggcggtgagattggcatcgtgggcgcgccgccgatgggtgccactgtgccggttgatatcaacttcctgctgttcaatcggaaattacgcgggattgttgaaggtcagtccatttccgacatcttcatcccacgtctggtcgaactgtaccgtcaaggcaagtttccgtttgataaattgatcaaattctacccgttcgatgaaataaaccgcgctgcggaagatagcgaaaaaggcgttactctgaagccagtgctgcgcattggt

SEQ ID NO: 638 - DNA, 1158 bp, Artificial Sequence
  Synthetic polynucleotide
atgttcgcggagatccaaattcaggacaaagatcgcatgggtacggccggcaaggtgatcaaatgtaaagctgctgtactctgggaacagaaacagccgttttctattgaagaaatcgaagttgcacccccgaaaaccaaggaggtccgtatcaaaattttagctactgggatctgccgtactgacgatcatgttatcaaaggtaccatggttagtaagttccctgtgattgtaggccacgaagcaacaggtatagtcgaaagcatcggagagggcgttaccaccgtaaaaccaggcgacaaagtgatcccgcttttcctgccgcagtgccgggaatgcaatgcgtgccgtaacccggatggtaacttgtgtatccgctcagacattactggtaggggcgttctggcggatggcactacccgttttacttgcaagggtaaaccggttcaccacttcatgaacacctccacttttacggaatataccgtagtagacgagtcgtctgtcgcaaaaatcgatgacgctgcgcctccagaaaaagtatgtctgattggttgcggcttctccactggttacggggctgccgttaaaacgggcaaggtgaaaccgggctctacgtgcgttgttttcggcctgggtggggttggtctgagcgtgatcatgggctgcaagtctgctggtgccagccgtattatcggtattgacctcaacaaagataaattcgaaaaagctatggcagtcggcgctactgaatgtatctcgccgaaagactccaccaagcccatcagcgaagttctgtctgagatgactggaaacaacgtgggttacacctttgaagttatagggcatctggaaacaatgatcgatgcactggcgtcctgtcacatgaattatggcactagcgttgttgtcggtgtcccgccttccgctaagatgctgacctacgatccaatgctgctgttcactggtcgaacttggaaaggctgcgtgtttggtggtctgaaatctcgtgacgatgttccgaaattggtaaccgaatttctggcgaaaaaatttgacctggatcaactcattacccatgtacttccgttcaagaaaatctccgagggcttcgaactgttaaacagtggacagagcatccgcaccgtgctaaccttc

SEQ ID NO: 639 - DNA, 1017 bp, Artificial Sequence
  Synthetic polynucleotide
atgaaggcggcagtagttgaacagttcaaagagcccctgaaaataaaagaagtcgaaaagccgaccatctcctacggcgaggtgcttgttaggatcaaagcctgtggtgtgtgccacactgatttacatgctgctcacggggactggcctgtaaaaccaaaattgccgctgattccgggtcatgaaggcgttggtattgtcgaagaagttggcccgggtgttacgcacctgaaagtgggcgaccgtgtaggtatcccgtggctctatagtgcatgcggacactgcgattactgtctgagcggccaagagacactgtgcgaacatcagaaaaacgcgggatattcagtagatggtggttacgctgaatactgccgcgccgctgcggactacgtcgtgaagatccctgacaatctgtcgtttgaagaggctgctcctattttctgtgcgggcgttaccacttataaggcactaaaagttactggcgccaaaccaggtgaatgggtggcaatctacgggatcggcggtctgggtcacgttgcagttcagtatgctaaagctatgggcctgaacgtcgttgctgtagatattggggatgaaaaactggagcttgctaaggaactgggcgccgacctggttgtgaacccactcaaagaggacgcggcgaaatttatgaaagaaaaagttggtggcgtgcatgcagcagtcgtcacggctgtatctaagccggccttccaatctgcgtacaacagcatccgtcgcggtggcgcttgcgtgctggtaggtttaccgccggaagagatgccgatccccatcttcgataccgttctcaatggtattaagattatcggctccatcgtgggtacccgtaaagacttgcaggaagcactgcaattcgccgccgaaggtaaagttaaaaccataattgaagtccagccgcttgaaaaaatcaacgaggtttttgatagaatgctgaaaggccagatcaacggccgtgtagttctgactttggaagataaa

SEQ ID NO: 640 - DNA, 1008 bp, Artificial Sequence
  Synthetic polynucleotide
atgcgcgcggcagtagttactaaggaccataaagtcagcattgaggataaaaaactgcgagccttgaagcctggcgaagctctcgtgcaaacggaatattgcggtgtttgtcacaccgatcttcacgtaaaaaatgctgactttggggatgtgacaggtgttactttaggccatgaaggtatcggcaaagtcatcgaagttgctgaggacgtagaatctctgaaaattggcgaccgtgttagtatcgcatggatgttcgaatcctgcggtcgttgcgagtactgcaccactggccgcgaaaccctgtgtcggtcagtgaagaacgcgggttacacggtggatggagccatggctgaacaggtcatcgttaccgcggactatgctgtaaaagttccagagaaactggatccggcagcagctagctccattacttgcgctggtgttaccacctacaaggcggtcaaagtgtctaacgtaaaaccgggccagtggctgggcgttttcggtatcgggggtctgggcaacctggcgcttcagtacgcgaaaaacgttatgggcgctaaaattgttgcatttgacatcaatgatgacaagctagcgttcgctaaagaactgggtgctgacgccataatcaacagcaaagatgtggatcccgtcgcggaggtgatgaagctcactgacaacaaaggtttggatgcaacggttgtaacttctgtcgcgaaaaccccgttcaatcaagctgttgatgtggttaaggccggtgcccgcgttgtagctgtgggactgccggttgataaaatgaacctggacatcccgcgtctggtactagacggcattgaagttgtcgggtcgcttgtgggcacaaggcaggacctgcgtgaagctttcgagtttgcagctgaaaacaaagtcactcctaaggttcagctgcgaaaactggaagaaataaacgatatcttcgaagagatggaaaatggaaccatcactggtcgtatggttatcaaattc

SEQ ID NO: 641 - DNA, 1095 bp, Artificial Sequence
  Synthetic polynucleotide
atggcaaagagctcagaaattgagcaccctgtaaaagcgtttgggtgggccgctcgcgacacgactggcttgctgtccccattcaaattcagccgtcgtgcaaccggtgaaaaagatgttcgattaaaagtgcttttttgcggtgtctgtcatagtgatcaccatatgatacacaataactggggcttcaccacttatccgatcgttcccggtcatgaaatcgtaggcgtggttacagaagtgggctctaaggttgagaaagttaaagtaggtgacaacgtcggaatcggttgcctggtgggctcgtgccgctcttgtgaatcctgctgtgacaaccgtgaatcgcactgcgagaataccattgatacttacggatctatctacttcgacggtaccatgacccacggcgggtatagcgatacgatggttgctgacgaacattttattctgcgttggccgaaaaacctgccgctggactctggtgctcctctgctctgcgcgggtatcactacatactccccgctgaagtactatggcctcgataaaccgggtactaaaatcggcgttgttggcctgggtggtctgggccacgtggctgtaaaaatggcaaaggccttcggtgcgcaagtaaccgttatagatattagcgaatctaaaaggaaggaggctctggaaaaactaggcgcagattctttcctgctgaacagcgaccaggaacagatgaaaggcgcgcgttcctcccttgatggaatcatcgacactgtcccggttaaccatccactggctccgttgtttgacctcctgaagccgaatgggaaactggtgatggtaggtgctcccgaaaaaccgttcgaactgccggtgttctccctgctgaaaggccgtaagctgctgggtggtaccatcaacggcggcattaaagaaactcaggagatgcttgattttgcggctaaacacaacatcacggccgatgttgaggtcatccctatggattacgttaacaccgcaatggaacggttagtcaaatcagacgtgcgctatcgtttcgtaattgatatagccaataccatgcgcactgaagaaagcctgggcgcg

SEQ ID NO: 642 - DNA, 1008 bp, Artificial Sequence
  Synthetic polynucleotide
atgcgcgcggcagtagttactaaggaccataaagtcagcattgaggataaaaaactgcgagccttgaagcctggcgaagctctcgtgcaaacggaatattgcggtgtttgtcacaccgatcttcacgtaaaaaatgctgactttggggatgtgacaggtgttactttaggccatgaaggtatcggcaaagtcatcgaagttgctgaggacgtagaatctctgaaaattggcgaccgtgttagtatcgcatggatgttcgaatcctgcggtcgttgcgagtactgcaccactggccgcgaaaccctgtgtcggtcagtgaagaacgcgggttacacggtggatggagccatggctgaacaggtcatcgttaccgcggactatgctgtaaaagttccagagaaactggatccggcagcagctagctccattacttgcgctggtgttaccacctacaaggcggtcaaagtgtctaacgtaaaaccgggccagtggctgggcgttttcggtatcgggggtctgggcaacctggcgcttcagtacgcgaaaaacgttatgggcgctaaaattgttgcatttgacatcaatgatgacaagctagcgttcgctaaagaactgggtgctgacgccataatcaacagcaaagatgtggatcccgtcgcggaggtgatgaagctcactgacaacaaaggtttggatgcaacggttgtaacttctgtcgcgaaaaccccgttcaatcaagctgttgatgtggttaaggccggtgcccgcgttgtagctgtgggactgccggttgataaaatgaacctggacatcccgcgtctggtactagacggcattgaagttgtcgggtcgcttgtgggcacaaggcaggacctgcgtgaagctttcgagtttgcagctgaaaacaaagtcactcctaaggttcagctgcgaaaactggaagaaataaacgatatcttcgaagagatggaaaaaggaaccatcactggtcgtatggttatcaaattc

SEQ ID NO: 643 - DNA, 1038 bp, Artificial Sequence
  Synthetic polynucleotide
atgcaggcgctggtaggtgctgagaccggcgggtatcgcttagcagataacgtcgaaaagccggttctgcaaccaggctccatcctctgtcacgtgaaagccgttgctctgaatccccatgacgctaaaattgttgactactcaaacgttccgggtgcactgggtggctgcgattttgcaggcgtagtggtagaaatcggtaacggcgttaaacgtttcaaagaaggtgaccgagtgttcgcggtcacttttggtatgaatgcttctgataagacggcgggcgcgttcacccagtacgccgtagcaactgaggacttgagctgcctgattccggaagctatgtcgttcactgaagcttgcagtatgggtctggcaatcgctaccgccggacttgcactgttccagacaccgggcctgcaactgagcatgcagggcggtaacggtgaagcggttctggtgtctggaggggctaccgcgactggcaccatggcaatccagtttctccgtatagcaggttatacaccggtcgttacttgctctccttccaacaacgctctgtgtgagtcctttggcgccgaaatttgtttcgattaccacagccctacttgcggcgctgatattcgcgtccagaccggtaacaaattgaggcatgttctggactgcgttgttgacatctccacgatgaaaatgagctacgacgccatcggtagctctggcggcgcgtatgtggctcttgaagcgatcccgaccaatatcaagtacacccgtcgcgatatttgcgctaactggctcatggcaccatctatccttggcaccccagtaaacaaaaaaggtgcttacggtcgtccgagtatgccggaacaccgtcaattcggtacgtacctgttcgctctggcggagaaatggctgcaagatggaagcattaaacaccatccgatcgaaatccgcgaagggggtctgcgtagcatccgtgaaggtattgatgatctgcgccggggcaatgtgcacgctaaaaagctggtatatcctttatcagca

SEQ ID NO: 644 - DNA, 1053 bp, Artificial Sequence
  Synthetic polynucleotide
atgacagcgacgaaggcttatgcagcccaaagttccacctctgggatggctccccacgacatagatcgccgtagcctccgtaacgacgatatcgcgattgagatcgattactgcggcgtttgtcatactgacattcacttcgctcagaatgactggggtgtaactcagtaccctgtcgttccaggtcacgaaatcgtgggccgcgtaaccgcagttggtccgggcgtcaaagcctatcaggaaggcgatgtggttggtgttggttgcatggtggactcgtgcaggacctgttcagcttgcgaagcgggcctggagcaatactgctctgaagggatgactggcacctataacggtgaagaccgtcaggatcatagcatcacttttggcggttactccgagcggatcgtggtaagcgaaagattcgttgttcgtattccggataaactggatatcacgaaagcagctccgctgctttgtgcaggtattaccacttactctccgctgcgccactacggcgtaaagccgggacataaagttggggttatcggtatgggcggtttgggtcacatgggcgtaaaatttgctaaagcgttaggagctgaagtcaccatcttcactcgctccgagtctaaagtgggcgaagcgaagaaacagggcgcagactatgtggttgttagtacagacgaagatcagatggcggctgctgccgaaacgttcgattttatgctagacactgtaccagttcagcacgatatcaacccgtacctgaactgcttgagctatgatggcacccatatcatggtgggtctgctggaacctctggaaccagcgctgcaaaccggcgcactggtcttcaaacgtcgtgttctggcgggttcattaattggcggtatgccggaaacgcaggaagtgctggacttttgcgctgagcatgatatttcctgtgacgttgaaatgctggacatccacaatattaacgatgcctacgagcgtatgaagaaaggtgatgtcaaataccgcttcgttatcgacatggctacgctgaaagacagc

SEQ ID NO: 645 - protein, 348 aa, Saccharomyces cerevisiae; identical to SEQ ID NO: 31

SEQ ID NO: 646 - protein, 339 aa, Candidatus Accumulibacter
MRVMQIQDDWGLGNLRLAERAQPQPGPGQVLLRMRAASLNYRDLVVPERGYGSFTGTLPLIPVSDGVGEVVEVGAGVRRVAPGDRVCPCFFQGWISGDPELGRMTGSLGGPLDGAMAEFMCLSEQGVVKIPSCLSDLEAATLPCAALTAWSALVTHGRVGPGERVLVQGSGGVALFALAFARIAGAHVTVISSSDEKIERLRALGADATINYTRTPEWSKTAREITGGRGFDHIVELGGEKTLPQSLRCIRAGGTLSMIGVLSGSLLAVPLGLIVTRQVRLQGITVGHRDGFEAMLRALEQHRPAITVDRVFEFTALREALAYLRSGVQFGKICIRHPD

SEQ ID NO: 647 - protein, 366 aa, Actinotignum schaalii
MKAAVVNSVGGGFTIEDIEIAEPIGREVLFDVKASGLCRSDLTLSTTNFGFPFPQVLGHEAAGVVTAVGPDVKEIKVGDHVVASLIQYCGHCRACRESRMYECEFPEETLRGPDEAPRLSRKGEPIFQTYGIAGFAEQALVHEHQVAKINPDMPFPQACVIGCAVITGAGAALNTARVRPGDTVAVVGLGGVGLSIVNGARIAGASRIIGVDTNPEKEEFGKKFGMTHFVNAGDRDVIEQIFTATDGRGVDKSFEALGIVPTMETAIAATRQGGDVYVAGVFKPEMEWTINPLNEFFVHRRHIHAVYMGNTDIKTDIPQYVEFYQQGRLHLDDLVATEIALDDIDATYKAMVDHHAGIGRVVITSF

SEQ ID NO: 648 - protein, 349 aa, Tepidicaulis marinus
MKSQAIVEYGQPLQEVTADMPEPKGGEVLVKVSHCGVCHSDVHLHDGYFDLGGGNKLDVRGGRQLPFTLGHEIEGEVVAVGPDAKGVQVGDQRVVYPWIGCGECPTCKRDEEQLCNKPRQLGIQVAGGYATHVMVPDAKYLLDYSGVKEGLAATYMCSGLTAYSAMKKLGDISPEERVMVVGLGGVGMMGLQFAKAMFDNAPLGADVDDQKLQAAMGAGAHQTYNPKDADAIKKVLADTNGGVPAAVDFVGSEASLKFASSIVRKGGKVIVVGLFGGGFAMPIPMFPMRAISIGGAYVGSLGETHEMMALVKAGKIDPIPVEERPLDQASKSLDDLREGKIMGRVVLKP

SEQ ID NO: 649 - protein, 363 aa, Sporisorium scitamineum
MSSESIPQKMRAATIKDFKKGYEVKDIDVPTDLGPNDILVKIAAAGYCHTDLQVMEGVYESQGAKPGLVGSHEPVGIVVKAGSDAGKSGIKVGDRVGSINTYGFCGKCDSCKQGKQLCDKLPGMLGLTLSGGFSQYMKADARVVSKVPDSIPSDQAAPLFCAGATVYGALLAVKPEKGQWLAMVGIGGLGHLGVQYAKAMGCKVIAIDNRREGLDLANKSPDHLKPDKTFLIDSKEAQNKVAEELSGSFYETNPGVDRVVINCEDRSLIKFSQQFLRKGGQLVDVGLPADGPFELDSFAMNFKEQTIRGRLICTPEQCQDMINLHADNGCTTFIEKTYSVDEANDMAEHYNSKKLQGRLCMVF

SEQ ID NO: 650 - protein, 310 aa, Aspergillus rambellii
ISHTRNLQIMTAVAIPKTQIAAVLPSGATLEARLDIRNDRPVPTPAEGEVLVKLEYSGVCHSDVHSVRGETPMLTDVAGHEGVGRVVQEYLVSPAAHVTKIPAELDPDTAAPLLCAGIAMYSSIMKTKTLPGDWIVLPGAGGGLGHMGVQIAVKKGLKVIAIDSGEKKKQLCLKLGATIFLDYKTDNVESEVKALTSGLGAHAVICTAQSEAAYEQSLRLLRSLGVLVCVGIPNVPFRLPASPFDMIVKGLTIVGNSAGTAREMEELMEMAVAGDVKAHIECFEFDQIDDVIQRLGRSEIDGRAVMRIPE

SEQ ID NO: 651 - protein, 364 aa, Ensifer adhaerens
MKSKAALLVDYNAPLVIDEVDVQGPKEGEVLVRIKAAGVCHSDLHAINGQYTHNLPLVLGHEGAGIVEDVGQGVTNVRPGDHVVLSWLPSCGKCRPCLRGRPANCEDASWPSAGTLRDGTSRFGKNGKTVFHYGATSTFSELTVVPSQSAVPVARDAPLTALSLIGCAVSTGVGAALNTAKLSPQDRVAVVGCGGVGLNIVQGARIAGAQTIVAVDRSSENLELARRLGATHLVNSEEGDVIANVQAITDGGVDFAFEAVGRRVTIALAMALLARGGRLVLVGMASREEVLGLDVLDTVVREVGVVGCWYGSCDPQRDFPRLVDFYKSGSLKLDEMIEVRPLEDINLAFSNLAKSTGGRTVIAF

SEQ ID NO: 652 - protein, 313 aa, Bacillus campisalis
MKAWQFTEVNKPLELIEAPEPTPGKDEVKIKVKASGLCHSDVGVIEGVTTPSLGKIPMILGHEIAGVITELGEGVTDFEVGDRVAVRAGADAPGSATDGGYAEFTVSPSKFVVKIPDNVDFISAASATDGGMTSYHALSVTGQVKEGDKVAIVGLGGLGLYGAQIALGLGATVYGVDIKEESRKAAEQMGVKNCVKDVRELADEEIDVVVDFVGYETTLSGSIEAVRPNGRVVLIGLGGSEGKINIFKFVTKSLTMASSIGGTTDDLKAVLELIGNGDVKPLLHQIKFDEISEGLQQLADNKVTGRLVAVIDN

SEQ ID NO: 653 - protein, 337 aa, Unknown
  Streptomyces sp. MMG1533
MKAAVVTDLGKPLEIQELPVPEPGPGQVLVKMEASGLCHTDIHAAHGDWPVKPRPPFVPGHEGVGPVQAVGEGVSADLVGKRVAIPWLGSSCGTCRYCVSGWETLCESQVNSGYSVDGCYAEYAVADAGAVVPVPQGVSSFDAAPLTCAGVTTYKAIKVARVVPAERVAVFGVGGLGHLAVQYARLVGGFVTAVDLEPDKLGLAHRLGADQLVNARTHDPVEEIKKAGGADVAVVLAASPKAFEQAYRSLNRGGRLVMVGLPADNAAINVPIFETVLSGISVIGSIVGTRQDLAEVFALHAAGRTQVIAEPRRLDQVNESFDEVLGGRAEARLVFEF

SEQ ID NO: 654 - protein, 348 aa, Bosea vaviloviae
MRCYQINEFGGSVEPADIELLPVTGSSVRLKVIAAGVCHSDVHICEGHYDLGGGRKISFAERIKFPRTLGHEVSGEVVEVGPDVEGVAVGDVCLVCSWIGCGECEQCAQGLENLCVNPRFVGVNRDGGFAEFVDVPDPRYLIDLGQLDPIAAAPMVCSGLTTFSALKKFGPLEGRRPIVVVGAGGLGLIAIAVARMLGSVGVVVVELDAAKREAALAAGALAAIAPGESALEDIRQAVGGPVWAVLDLVGSGSTAKLAVDALDKTGKLVVVGLFGGAIDLPVPTFPLKVLTIQGSYTGSPAELREFVALAREKGLPAAPLDKRPLSAAPAALADLKAGRVIGRVVLQP

SEQ ID NO: 655 - protein, 360 aa, Alcanivorax dieselolei; identical to SEQ ID NO: 24

SEQ ID NO: 656 - protein, 343 aa, Unknown
  Rhizobium sp. Leaf453
MIPKMMKAALCTGAATPLVCQEIETPVPQAGQLLVCLESCGVCHSDLHLRNGDENLPDEFYPLVLGHEGIGRIVAIGEGTQTSLKLGDRVGLPWLYDTCLDCGPCLTGSETFCTHQRARGIHAHGAFAEYALLESRFACVIPDGIDPVQGAPLLCAGLTAWSALRKTSIRPGKTCLVIGCGGLGQYAIMIAKAHGATVIAVDRDPAKLEEARKRGADHLVSAGPDAGMQVKALGGADISINFAPTPAVWQTIEQAANPMSDIVAIALVHDPVPLSMMWLIDGGHRVFGSSVGTRQDLRDFLDFAVKNRLDADVEVIPLSQVDTALDRLQAGSVTGRLCIDFSL

SEQ ID NO: 657 - protein, 348 aa, Unknown
  Mycobacterium sp. Root265
MSTQTMRAQRFYADTKIIAVEDVPIPEPGPGEVLVKVAFCGICHSDLSLINGTFPSQLPVVTQGHEASGTVAALGPGVTGWAEGDRVVVAAGRPCQGCPNCARGDFGNCLRIRLMAFAYDGAWAQYTVAQAFGLTRVPDNVPLEQAAILADAVSTPYGAVVRTGKVGIGESVGVWGVGGVGTHIVQLARLVGAAPIIAVDIKPAVLDRALALGADYAFDARDGALGEKIAELTGGRGLDIAFDAVGLGSTFDQALASLTMGGRLVGVGMSADAPSIGPTSFFNLTRKQVLGHLGYQNADIATLANLVSLGRLDLSRSISEIVSLEEVAAGIEKLERADGDPIRILVQP

SEQ ID NO: 658 - protein, 351 aa, Didymella rabiei
MSSTPDFNGWVAHDPSAAEGNMKWGNFEPKAFEETDIEMEISHCGVCGSDIHTLRSGWGPSDYPLVVGHEIIGHVTKVGKDVKDLKVGDRVGVGAQSECCESCRPCKMKQESNCNSLTMTYNAKHSNGDKSYGGYAKAWRGPASFAIPIPEGLPSEFAAPLMCGGVTVYNPLVSNGAGPGKRVGVVGVGGLGHFALLFAKALGADEVVAISRSSSKKEDAIKLGADRFIATGEDPDWATKNANGLDLIISTISGSFPLDQYLNLLDVNGTFVQLGAPDDPLPSFSPMGLIFKNLKIAGSLIGTRQQIRDMLELAKKTNLQAWVQVRPMSEANQVIVDFEKGLPRYRYVLKN

SEQ ID NO: 659 - protein, 350 aa, Rhizobiales bacterium; identical to SEQ ID NO: 22

SEQ ID NO: 660 - protein, 343 aa, Unknown
  Nocardia sp. 852002-20019_SCH5090214
MRAAQLPSLGSDLEIVEVPDPTPGPGEVVVRIAASGVCHSDLTIQQGGPGMPPTPYFPWTPGHENTGFVHALGAGVTGLAVGDAVAVWPGWGDGTCRVCRAGHEHVCPNVSYVGVTQPGGWADYLLVPAARHLVSLGDLDPVAAAPLTDAGLTAYGAVAKVLERLSGSDRSVGIIGAGGLGQFAIKYLAALTSATIVAIDTDEAKRAHALDIGAALSVDPTTDDAIPQLQNVSEGGLGLDAVIDFVGIDSTLCLAAATTVACGAIILVGIGGGTLDFGYTNPNQQVQVSTSSLGSRADLATVIELWKEHGINAETTRYRLDEVNDALRDLAAHKIGERAVLVL

SEQ ID NO: 661 - protein, 331 aa, Tortispora caseinolytica; identical to SEQ ID NO: 20

SEQ ID NO: 662 - protein, 385 aa, Unknown
  Duganella sp. HH101
MKITAALARGARQALAVTELELDEPRDDEVLVRVVASGICRTDIDVRDGYLPTPTPVVLGHEGSGVVVRVGRLVRQFAPGDHVVMSMGSCGVCPSCQVGMPAYCVQHVPLNFMGSRPDGSVCMHEHGERVHSHFFSQSSHASFTVAHQSSLVKVADDVDLRWLGPLACGVMTGAGGVINTLKPEAGTSIVIFGAGTVGLSALMASKIVACSRRIVVDNKPERLALARELGATDTILATADADVAAQVRALTDGLGAHNAFESSGVKSVIGAALTAIRERGTCVITGVLPQGSVVEFDAWQLLRGRTVRGSVMGDCLPSQFIPRLVEFYRQGQLPLEKISRLYPLADINQAIEDGISGAVVKAIVVMPHPDASTTQDYHDRTQQSF

SEQ ID NO: 663 - protein, 341 aa, Chloroflexi bacterium
MRALELVGFDGPGSLRLGDRPEPAPGPRQVRVRLRASALNHLDVFVTRGLPKRPLPAILGADGAGVIDAVGVGVERRRVGDEVVIYPVVSCGACEWCTRREEVHCPTFGILGEHIDGTFQESLVVAERSAFTRPQRLSWPEVAALPLSFLTAWRLLFTRGRLERGDSLVIVGIGGGVALAALLLGKARGLRVFVTSRDPAKLERAKMLGADAAYPSNAFAKPVREATGGAGARAVVDTVGPATFEESFRALAREGELLTVGSTSGPKVELMLPRLFFRHLSLVTSTMGTSREFEAMLADVARFHIRPVVDETYPLAKGADAFARLEAGEQFGKIVLEPGSG

SEQ ID NO: 664 - protein, 451 aa, Unknown
  Fungal sp. no.14919
MEVLSTHPDMPEPLGAMNHGSSGQPRPPTSRIETPNLQTPYVRDDTESSYTKNESNKRAKLTIKENLHTKTHGLFGEVPEEQVAILTPFVSKPLTLELRTVPVIRPSLGEVVVRIAWTGICASDIYFATGTDATYCSHSHIGGHEGIGHIVQSHDPAHIGQAVGMRFMAYTCGVCCYCLKGVPESCPRQVCFTRHLRGSYQQYATVPYTSLAILPDYVFQHENPAIYTTALCSGAAALKALRKAGIRPNDVVVVIGIGGQIGYLAGVMARRVYSARVVGIDIASKANSPTISEACDVYLPSPTEGGTHMSDEFQSLLQSTCTKLRADPNLPRGADAVIAAGSSVDSYRDLPSYVCDGGSIGFVGSPTYSITFDVKRILERQLSIKGTLMGDRKDSYQVMDYIRSGILKPKINEIELQDLPEYMQGFLAQKNWGKGVARINGPLPSAAPLTR

SEQ ID NO: 665 - protein, 362 aa, Sphingomonas jeddahensis
MKAAVIFETKAPLQIEDVVVSNPGPHEVLIRTVACGVCRSDLHFVDGAYPHPLPAIPGHEAAGIVEAVGSEVRTVKVGDAVVTCLSAFCGHCEFCITGRMFLCVSAETRRGPKAEARLKLASGGNVNQMLNLSAYAEQMLVHEHACVAIDPEMPLDRAALIGCAVTTGAGAVFNTTDVTPGETVCVVGCGGIGLAAVNAAKIAGAGKIIALDPVPEKRAVAEKLGATHTYDPLKEGVVGEVVELTKGGVHHAIEAVGRTQSAQTTVDVLRRGGTATILGMMPLDAKVGLSAMELLSGKKLQGGIMGSNRFPVDIPRLVDFYMRGLLDLDTIIAERLPLSQINHAFDELRKGDATRSVIVFDQ

SEQ ID NO: 666 - protein, 348 aa, Spirochaetes bacterium
MKAAIFTQFGGPITITEVPDPVVAADGVVLKIDATGICRSDWHGWKGHDPDIKLPHVPGHELAGTIVEVGKDIKNWKRGDRVTMPFVAGCGHCLPCLTGNPQVCDHQFQPGFTAWGSFAEFVAIRYADMNLVRLPTTLDSATAASLGCRFATAFRALDAQAKLRPGEWVAIYGCGGVGLSAIMIAAAMGARIIAIDIQKEKLEKAKELGANVVFNSREVPDIVAAIHEVTHGGAHVSMDALGSPETCFNAIASLAKRGRHVQVGLMLADQKHPAIPMDLVIARELEIYGSHGIQAHRYGALLGMIEAGRLYPERLIQARLTLRQGVDFLQKMDQFPGVGISVITSISP

SEQ ID NO: 667 - protein, 333 aa, Unknown
  Sulfuriferula sp. AH1
MIKAFAAFEPHGELKPFEYDPGQLKPDEVEIDVQYCGICHSDLSVIDNEWGITEYPVVPGHEVVGTIGKIGADVKHLKIGQVVGLGWHAGYCNECEPCKTGDNNLCATAQATIVGHHGGFADKVRASANSVVPIPEGIDLESAGPLFCGGITVFNPLVQFDIKPTDKVAVIGIGGLGHMALQFLNGWGCDVTAFTSSENKKKEALELGAHHTLNSRDPKQIEAAAGRFDMIISTVNVKLDWNLYLGTLKPRGRLHFVGATLDPLDINVFSLIMAQRSISGSPVGSPLTIARMLEFAKRHHVKPVIEKFSFADINKAIERLRSGNAHYRIVLHR

SEQ ID NO: 668 - protein, 340 aa, Magnusiomyces capitatus
MAEIPEKQTAFVFKNGSFALEKKEIEVPKPDAGKVLLKVAAAGVCHSDLHVLHGGLPYPDGLILGHEIAGHIVAYGDGVDKAAFPSDALYAVVGPNPCGMCKACRTGADNVCEDPSRTHMGLGSPGGYEQYTQVSARNITKVPEGIPAAVAAASTDAVLTPYHALKRAGINGMTRLLIVGLGGLGINAVQIAKAFGSYVIAVDPKESSRDLAKQYGANEVYAKLPEESLDVDVAADFYGSQGTFDLCQKHVKAQGILLPVGLQDPKITFDLNHLAFREYTIIGNFWGTSQDQTEVFELVKKGLVTPQVETTSWLNVNKVLKDLDEGKIKSRMVLVHNEDN

SEQ ID NO: 669 - protein, 341 aa, Salmonella arizonae
MKALSKLKAEEGIWMTDVPEPEVGHNDLLIKIRKTAICGTDVHIYNWDEWSQKTIPVPMVVGHEYVGEVVGIGQEVKGFNIGDRVSGEGHITCGHCRNCRGGRTHLCRNTTGVGVNRPGCFAEYLVIPAFNAFKIPDNISDDLASIFDPFGNAVHTALSFDLVGEDVLVSGAGPIGVMAAAVAKHVGARHVVITDVNEYRLELARKMGVTRAVNVAKESLTDVMAELGMTEGFDVGLEMSGAPPAFRTMLDTMNHGGRIAMLGIPPADMSIDWTKVIFKGLFIKGIYGREMFETWYKMAALIQSGLDLSPIITHRFSIDDFQKGFDAMRSGQSGKVILSWD

SEQ ID NO: 670 - protein, 349 aa, Bacillus subtilis
MCNQHQTRVLSVSHAKAKFEQTTIERRGLRPHDVLIDIKFSGICHSDIHSAFDEWGGGIFPMVPGHEIAGVVTAVGTKVTKLAVGDRVGVGCFVDSCGECEYCLNAEEQFCTKGVVQTYNSVDYDGNPTYGGYSQKIVVTDRFVVRIPDRLEMDVASPLLCAGITTYSPLKHWNVGPGKKVAIVGVGGLGHLAIQFAHAMGAEVTVLSRSMNKKEEALELGANHYFATSDPATFTALAGRFDVILNTVSANLDVDAYLSMLRIDGTLVSVGAPAKPDTYSVFSLIMGRRSIAGSLVGGIQETQEMLDFAAEHGIEPKIEVIGADQVDEAYERILRSDVRYRFVIDISTL

SEQ ID NO: 671 - protein, 284 aa, Ralstonia solanacearum
MPYAVKSYAAHSPTSRLGLFECDRRSPQPDDVVIEILYCGVCHSDVHNVRNDWGSAQYPMVPGHEIVGCVLEVGSEVTRFKAGDHVGVGCMVESCRHCNACGKGWEQYCENGATYTYNGTDPIDGTRTYSGYSEKIVVAEHFVLKVPDGLDLAGAAPLLCAGITTYSPLRHWKVGPGSKVAIVGLGGLGHMGLKLAKAMGTEVTLFSRSPGKEADARRLGADHIVMSTDTAQMAAAVDGIDAIVLTHGSDGGGHGACARARRPGAALGRRTFFSPPDPSLRRLH

SEQ ID NO: 672 - protein, 357 aa, Acidiphilium multivorum
MSATMKAWAVVENGAPLKEIDLPMPEPTGREILLEVTHCGVCHSDLHLWDGYYDLGSAGRYEIVQRGITLPLALGHEIVGRVVKLGPEASGVKVGDVRIVYPWVGCGECARCKAGEDNLCAKQRSLGIYQHGGYATHVIAAHAGHLVDPGDLDPALAATYACSGITVYAAIRKVMPLPADTPVVLIGAGGLGLSAIAVLRALGHKAIVSVDTSARKREAALAAGATAVVDGNDPALHKAIIAACGGQPEAIIDLVNGSGTAKAAHAALAKGGKLIMVGLFGGELNIPLPFMPMRALTLQGSFVGTPGDLRELVDLAQGGALPKLQIETVPQREADAAIHRLKAGDVTGRLVLVADGA

SEQ ID NO: 673 - protein, 373 aa, Castellaniella defragrans
MNDTQDFISAQAAVLRQVGGPLAVEPVRISMPKGDEVLIRIAGVGVCHTDLVCRDGFPVPLPIVLGHEGSGTVEAVGEQVRTLKPGDRVVLSFNSCGHCGNCHDGHPSNCLQMLPLNFGGAQRVDGGQVLDGAGHPVQSMFFGQSSFGTHAVAREINAVKVGDDLPLELLGPLGCGIQTGAGAAINSLGIGPGQSLAIFGGGGVGLSALLGARAVGADRVVVIEPNAARRALALELGASHALDPHAEGDLVAAIKAATGGGATHSLDTTGLPPVIGSAIACTLPGGTVGMVGLPAPDAPVPATLLDLLSKSVTLRPITEGDADPQRFIPRMLDFHRAGKFPFDRLITRYRFDQINEALHATEKGEAIKPVLVF

SEQ ID NO: 674 - protein, 341 aa, Unknown
  Flavobacterium sp. F52
MKAVRFFGHKDVRVVNDIERPVPKGDEVLLKIGGAGVCHSDLHIIDEGTVVGTVFTLGHENAGWIEEVGENVEGYKKGDAVLVYGPWGCGHCKPCQQSKENYCDHQSEQAYGGGLGLDGGMADYMLVPSSRLLVPIFDLDPVIAAPLTDAALTPYSAIKRSLPKLMADEYVVVIGVGGLGHVALQILREISGAEIIACDVTEDKLAFAKQLGAAYVINSKDADATEQIQKITGIKKAKVVLDFVGATSTIDLGTKVVSLDGDLTIVGLGGGHYQYSMNGLPFGVSMTNPYWGSRTELMEVVGLARQKKIHIEIEKHKLDDANEVYERMRQGKIKGRAVLIP

SEQ ID NO: 675 - protein, 363 aa, Trichosporon asahii
MGEPFTQIDAWYSNDPQKPLQFGKLDAKPIEDYDIDVKVLYCGLCSSDVGVLSGAYGPVHEEVCGHEIIGTVTRVGPEVKHLRVSDHVGVGGQCDCCTHCPACERGDEHMCPGLTFTIGMIQGPYKRGKAKGRLGQGGFAKQWRGNARFAFKIPDGVELASAGPLFCAGTTVFTPLRRFGAGKERNRVGVIGLGGLGHLGIQLAAALGADVTAISRGNSKEEDARKLGAKHYIATGSDLKKDFEKHQGSLDLIICTINPPDLDVDAYFTLLSAGGLFVPLGIPHKPLVIDPIGLILGQKGVVGSALGAPQDIKALLELCAKTGVKPWVQLWEFSDINKAIEAFNRGEPRYRFVLVNTDNGGEL

SEQ ID NO: 676 - protein, 372 aa, Bifidobacterium asteroides
MPQKIKASIAYGIGKGFAQPEEIIIDDPIGAEVLVDVQASGLCHSDLHLVEDDDKFFPFPAVIGHEISGIVEAVGPEVSGIKVGDHVVASLEQVCGHCANCLKGQPQSCTQQQECVRGAGEKPRLSFPDGRPITQAFGTGGFAEKALIHENQLAVVNNQVKWDEAACIGCATITGAGAAINTAHVRPGDTVAVIGTGGIGLNIISGARICGAKRIIAIDLLDNKLEFARKFGATDVVNSKNEDPVAKVRELTDGGVDKAFEAIGLPVTMKQAWDMLGVGGTAYPIGLTKPDATVSLEINPADLLVHQRGFKGVWMGSTNIKHDIPMYADFAVDGRLNMHDIVSQHIKLSQIDEAYKQLVNGEVIRSVITEFD

SEQ ID NO: 677 - protein, 354 aa, Candidatus Kinetoplastibacterium
MKCYCLNKFLTPLKKQEIDTPTPSGEEVLLKIKASGICHSDIHFWEGYYDIGEDKKLELKDRGIKLPMILGHEIVGTIVLKGSDVIDLEIGDNCIVYPWIGCGNCESCNISQENYCVNPRYLGIQRSGGFAEYVLVPSYKYLIDIKNNNPVTTAQYACSGLTTYSAIKKIDQSIYTKKPIVIFGAGGLGLTAISILKALNSFGVLVVEKDESKRKAALKAGALDVFDLFDENLESKLLEYNNGNKYKAVIDLIGNNLTSRISFNVLDKFSTLVIVGMFGGLSSWPIALIPMKAIKIIGSYVGNLNEFYELMDLVIKNKITPTPVQAYHFDRINEAMDDLRTGNVIGRAVLVHDS

SEQ ID NO: 678 - protein, 309 aa, Baudoinia panamericana
MVMDGVFNAPLPLIGSHEGAGTVTAVGSAVENFSIGDRVMAHVRRNTCGECSECLGPDVWKYCCTAPRDSLGITTDGAFAEYLVADSRWSVKLPKGFPFTVAAPLACAGATSFRAVKMAGLERGQWLAIVGSGGGLGHLSIHFAKHRGLNVIGIDARDAGLALSLRSGADHVLDARKGKDRIVNQVQSLTKGRGVDATINLSDAGSAASMSCAITRIHGTVWQVAQPRDVAVPYQELVLRDIRLRGSVICSPMDAQEMIATVAGMGGDIVAVRTYVGLESLPKLLQDVRAHDAVGKAIIVVDRAQVTQA

SEQ ID NO: 679 - protein, 354 aa, Ceriporiopsis subvermispora
MSSSSILSGRAAIIREVGLKTVIETVPAQKQPSELLPGECLVKLEYSGVCHSDLHFMLGEFAPPSLPTVGGHEGVGHIIAIGEQSDRCRFRVGDKVGITLLGSTCMQCELCLSGKEQYCAKFKTLGFEAWGTFSEYVVAHTDYVVPIPANLPSPVATPVLCAGATVYSALKNSMSSVGDWLAVSGAGGGLGHLAIQYGVAMGLRVIAIDTGEEKKNLCLSLGAEQWIDYKESSDVIADVRAAAGGVGPHVALIAIGSHAPYLQASLYLRPMGRLLCVGLPSGPLNGLLLTPFAVRGIKLIGSVLGSRKEIVEALDLAARGKVTPHFEVRPHAEINDVLERMHKGLLVGRVLLKY

SEQ ID NO: 680 - protein, 365 aa, Pseudocercospora fijiensis
MASSTTNGSNSVPATQKAAQFNPSDQSVSINEIPVPSIKPYEILVKVKAASLCHSDLMLFEENEQGLKLGSGEPFTMGHEGCGTIIEVGSEVGDNFKPGDRIGWLPIVDCCYDCEECQIHNLYCEKGTSKVQGMTVDGYFQEYAAINWRNAAHIPDGMDLANLAPLFCAGCTAFNSVTDTIAELKGIPEENWVAVVGCGGLGHLGIQYLKAFGYKVIGIDLSADAVEEALAQGADHVFNPMKCADYIDQVRQITGGKGCHAVINYTNSVPAYSNAVGLLRMNGVLMVTGIPQKPLQFSAMDVSMKRIRVRGSNNGTTPRLKKCVEFSYKHGIEPHVTQFKLEEFPKMVELMRSNRHKGRLGVLFQ

SEQ ID NO: 681 - protein, 355 aa, Dacryopinax primogenitus
MTPEQIPQTQKAAVVRNKQVAIETVPVVQPADLKPNEALVKVLYSGVCHTDLHAQLGDWPLIHKEPLIGGHEGAGIIVAIGEHSDTDLKLGDRVGIKWLADSCLKCSYCRQGYEPLCHHALCSGFSVDGSFQQYAVSFTRHLTKIPKELPMDKAAPILCAGVTVYKALKQSNARPGEWVVLPGAGGGLGHLAVQYAHYMGLRCIAVDTGAEKKALCERLGAERWIDFKETKDIVAAVKAATPDGDGPHAAIVTSSVGAAYEEALQYVRPHGTVVAVGLPPDAKVSADVFWTVFLEKQLKGSYVGNRQDAIEALEIAASGALETSFRTLPLKDLPSVYDQLHAGSLVGRVVLDLWA

SEQ ID NO: 682 - protein, 325 aa, Schizosaccharomyces pombe
MQYYQMMKALRMLKKPKPGCLGIEIQSVPIPQPKNGELLVKIEAAAINPSDLMNATGGFPYTVYPRIVGRDYAGTVISGASHLVGTRVFGTSGSELSFTKDGTHAEYCIIPEKAAVRMPSNLSFTEAASVGVPFTTAYLALSRGETKGSDIVLVVGALGAVGSAVCQIAEDWGCKVITVSRSGSTDINTVVDPELKRVHELVEKVDVVIDTVGDPLLMKSALNQLGIGGRLSYISAPKQGSIEFSYDMKQIYRKNLKIIGCNSLLLSLVESNSLLKNMVAKFEAGKYKVLNKKIAETSLTDECINSYRKLMNECSTKFVITMSTN

SEQ ID NO: 683 - protein, 350 aa, Emericella nidulans
MSIPTMQWAQVAEKVGGPLVYKQIPVPKPGPDQILVKIRYSGVCHTDLHAMMGHWPIPVKMPLVGGHEGAGIVVAKGELVHEFEIGDQAGIKWLNGSCGECEFCRQSDDPLCARAQLSGYTVDGTFQQYALGKASHASKIPAGVPLDAAAPVLCAGITVYKGLKEAGVRPGQTVAIVGAGGGLGSLAQQYAKAMGIRVVAVDGGDEKRAMCESLGTETYVDFTKSKDLVADVKAATPDGLGAHAVILLAVSEKPFQQATEYVRSRGTIVAIGLPPDAYLKAPVINTVVRMITIKGSYVGNRQDGVEALDFFARGLIKAPFKTAPLKDLPKIYELMEQGRIAGRYVLEMPE

SEQ ID NO: 684 - protein, 355 aa, Gallus gallus
MAATGQNLAVVVHRAGDLRLENRPIPEPGPNEVLLRMHSVGICGSDVHYWQHGRIGDFVVKDPMVLGHEASGTVIKVGAGVTHLKPGDRVAIEPGVPRETDEFCKTGRYNLSPTIFFCATPPDDGNLCRYYKHSASYCYKLPDSVTFEEGALIEPLSVGIHACKRAGVTLGSRVFVSGSGPIGLVNVIIAKMMGAAAVVVTDLSASRLQTAKELGADFTIQIKNETPQEVAAKVESLLGCMPEITVECTGVQACIQASIYATRSGGTLVLVGLGPEMVTVPIVNAAVREVDIRGIFRYCNTWPVAISLLASKRINIKPLVTHRFPLEKALEAFETTKRGEGVKIMLKCDPTDQNP

SEQ ID NO: 685 - protein, 380 aa, Trifolium repens
MSNTAGQVIKCRAAVAWEAGKPLVIEEVEVAPPQAGEVRLKILFTSLCHTDVYFWEAKGQTPLFPRIFGHEAGGIVESVGEGVTHLKPGDHALPVFTGECGECPHCKSEESNMCNLLRINTDRGVMINDNKSRFSIKGQPVHHFVGTSTFSEYTVVHAGCVAKINPDAPLDKVCILSCGICTGLGATVNVAKPKPGSSVAIFGLGAVGLAAAEGARMSGASRIIGVDLVSSRFELAKKFGVNEFVNPKDHDKPVQQVIAEMTDGGVDRAVECTGSIQAMISAFECVHDGWGVAVLVGVPKKDDAFKTHPMNFLNERTLKGTFYGNYKPRTDLPNVVEQYMKGELELEKFITHSIPFSEINKAFDYMLKGESIRCIIRMEE

SEQ ID NO: 686 - protein, 379 aa, Cenchrus americanus
MATAGKVIKCKAAVAWEAGKPLSIEEVEVAPPQAMEVRVKILYTSLCHTDVYFWEAKGQTPVFPRIFGHEAGGIIESVGEGVTDVAPGDHVLPVFTGECKECPHCKSAESNMCDLLRINTVRGVMIGDGKSRFSINGKPIYHFVGTSTFSEYTVMHVGCVAKINPEAPLDKVCVLSCGISTGLGASINVAKPPKGSTVAIFGLGAVGLAAAEGARIAGASRIIGVDLNPSRFEEAKKFGCTEFVNPKDHNKPVQEVLADMTNGGVDRSVECTGNINAMIQAFECVHDGWGVAVLVGVPHKDAEFKTHPMNFLNERTLKGTFFGNFKPRTDLPNVVELYMKKELEVEKFITHSVPFSEINKAFDLMAKGEGIRCIIRMEN

SEQ ID NO: 687 - protein, 380 aa, Solanum tuberosum
MSTTVGQVIRCKAAVAWEAGKPLVMEEVDVAPPQKMEVRLKILYTSLCHTDVYFWEAKGQNPVFPRILGHEAAGIVESVGEGVTELGPGDHVLPVFTGECKDCAHCKSEESNMCSLLRINTDRGVMINDGQSRFSINGKPIYHFVGTSTFSEYTVVHVGCVAKINPLAPLDKVCVLSCGISTGLGATLNVAKPTKGSSVAIFGLGAVGLAAAEGARIAGASRIIGVDLNASRFEQAKKFGVTEFVNPKDYSKPVQEVIAEMTDGGVDRSVECTGHIDAMISAFECVHDGWGVAVLVGVPHKEAVFKTHPMNLLNERTLKGTFFGNYKPRSDIPSVVEKYMNKELELEKFITHTLPFAEINKAFDLMLKGEGLRCIITMED

SEQ ID NO: 688 - protein, 380 aa, Solanum tuberosum
MSTTVGQVIRCKAAVAWEAGKPLVMEEVDVAPPQKMEVRLKILYTSLCHTDVYFWEAKGQNPVFPRILGHEAAGIVESVGEGVTELAPGDHVLPVFTGECKDCAHCKSEESNMCSLLRINTDRGVMINDGQSRFSINGKPIYHFVGTSTFSEYTVVHVGCVAKINPLAPLDKVCVLSCGISTGLGATLNVAKPTKGSSVAIFGLGAVGLAAAEGARIAGASRIIGVDLNASRFEQAKKFGVTEFVNPKDYSKPVQEVIAEMTDGGVDRSVECTGHIDAMISAFECVHDGWGVAVLVGVPHKEAVFKTHPMNFLNERTLKGTFFGNYKPRSDIPSVVEKYMNKELELEKFITHTLPFAEINKAFDLMLKGEGLRCIITMED

SEQ ID NO: 689 - protein, 337 aa, Zymomonas mobilis
MKAAVITKDHTIEVKDTKLRPLKYGEALLEMEYCGVCHTDLHVKNGDFGDETGRITGHEGIGIVKQVGEGVTSLKVGDRASVAWFFKGCGHCEYCVSGNETLCRNVENAGYTVDGAMAEECIVVADYSVKVPDGLDPAVASSITCAGVTTYKAVKVSQIQPGQWLAIYGLGGLGNLALQYAKNVFNAKVIAIDVNDEQLAFAKELGADMVINPKNEDAAKIIQEKVGGAHATVVTAVAKSAFNSAVEAIRAGGRVVAVGLPPEKMDLSIPRLVLDGIEVLGSLVGTREDLKEAFQFAAEGKVKPKVTKRKVEEINQIFDEMEHGKFTGRMVVDFTHH

SEQ ID NO: 690 - protein, 382 aa, Petunia hybrida
MSSNTAGQVIRCKAAVAWEAGKPLVIEEVEVAPPQKMEVRLKILFTSLCHTDVYFWEAKGQTPLFPRIFGHEAGGIVESVGEGVTDLKPGDHVLPVFTGECQQCRHCKSEESNMCDLLRINTDRGVMIHDGQTRFSKDGKPIYHFVGTSTFSEYTVCHSGCVTKIDPQAPLDKVCVLSCGISTGLGATLNVAKPTKGSTVAIFGLGAVGLAAAEGARIAGASRIIGVDLNPSRFNDAKKFGVTEFVNPKDHGDKPVQQVIAEMTDGGVDRSVECTGNVNAMISAFECVHDGWGVAVLVGVPNKDDAFKTHPMNLLNERTLKGTFFGNYKPKSDIPSVVDKYMKKELELEKFITHQVPFSEINKAFDYMLKGESIRCMITMEH

SEQ ID NO: 691 - protein, 380 aa, Solanum lycopersicum
MSTTVGQVIRCKAAVAWEAGKPLVMEEVDVAPPQKMEVRLKILYTSLCHTDVYFWEAKGQNPVFPRILGHEAAGIVESVGEGVTDLAPGDHVLPVFTGECKDCAHCKSEESNMCSLLRINTDRGVMLNDGKSRFSINGNPIYHFVGTSTFSEYTVVHVGCVAKINPLAPLDKVCVLSCGISTGLGASLNVAKPTKGSSVAIFGLGAVGLAAAEGARIAGASRIIGVDLNASRFEQAKKFGVTEFVNPKDYSKPVQEVIAEMTDGGVDRSVECTGHIDAMISAFECVHDGWGVAVLVGVPHKEAVFKTHPLNFLNERTLKGTFFGNYKPRSDIPCVVEKYMNKELELEKFITHTLPFAEINKAFDLMLKGEGLRCIITMAD

SEQ ID NO: 692 - protein, 336 aa, Escherichia coli
MKAAVVTKDHHVDVTYKTLRSLKHGEALLKMECCGVCHTDLHVKNGDFGDKTGVILGHEGIGVVAEVGPGVTSLKPGDRASVAWFYEGCGHCEYCNSGNETLCRSVKNAGYSVDGGMAEECIVVADYAVKVPDGLDSAAASSITCAGVTTYKAVKLSKIRPGQWIAIYGLGGLGNLALQYAKNVFNAKVIAIDVNDEQLKLATEMGADLAINSHTEDAAKIVQEKTGGAHAAVVTAVAKAAFNSAVDAVRAGGRVVAVGLPPESMSLDIPRLVLDGIEVVGSLVGTRQDLTEAFQFAAEGKVVPKVALRPLADINTIFTEMEEGKIRGRMVIDFRH

SEQ ID NO: 693 - protein, 366 aa, Pseudomonas putida
MEIKAAIVRQKNGPFLLEHVALNEPAEDQVLVRLVATGLCHTDLVCRDQHYPVPLPMVFGHEGAGVVERVGSAVKKVQPGDHVVLTFYTCGSCDACLSGDPTSCANSFGPNFMGRSVTGECTIHDHQGAEVGASFFGQSSFATYALSYERNTVKVTKDVPLELLGPLGCGIQTGAGSVLNALNPPAGSAIAIFGAGAVGLSAVMAAVVAGCTTIIAVDVKENRLELASELGATHIINPAANDPIEAIKEIFADGVPYVLETSGLPAVLTQAILSSAIGGEIGIVGAPPMGATVPVDINFLLFNRKLRGIVEGQSISDIFIPRLVELYRQGKFPFDKLIKFYPFDEINRAAEDSEKGVTLKPVLRIG

SEQ ID NO: 694 - protein, 386 aa, Homo sapiens
MFAEIQIQDKDRMGTAGKVIKCKAAVLWEQKQPFSIEEIEVAPPKTKEVRIKILATGICRTDDHVIKGTMVSKFPVIVGHEATGIVESIGEGVTTVKPGDKVIPLFLPQCRECNACRNPDGNLCIRSDITGRGVLADGTTRFTCKGKPVHHFMNTSTFTEYTVVDESSVAKIDDAAPPEKVCLIGCGFSTGYGAAVKTGKVKPGSTCVVFGLGGVGLSVIMGCKSAGASRIIGIDLNKDKFEKAMAVGATECISPKDSTKPISEVLSEMTGNNVGYTFEVIGHLETMIDALASCHMNYGTSVVVGVPPSAKMLTYDPMLLFTGRTWKGCVFGGLKSRDDVPKLVTEFLAKKFDLDQLITHVLPFKKISEGFELLNSGQSIRTVLTF

SEQ ID NO: 695 - protein, 339 aa, Geobacillus stearothermophilus
MKAAVVEQFKEPLKIKEVEKPTISYGEVLVRIKACGVCHTDLHAAHGDWPVKPKLPLIPGHEGVGIVEEVGPGVTHLKVGDRVGIPWLYSACGHCDYCLSGQETLCEHQKNAGYSVDGGYAEYCRAAADYVVKIPDNLSFEEAAPIFCAGVTTYKALKVTGAKPGEWVAIYGIGGLGHVAVQYAKAMGLNVVAVDIGDEKLELAKELGADLVVNPLKEDAAKFMKEKVGGVHAAVVTAVSKPAFQSAYNSIRRGGACVLVGLPPEEMPIPIFDTVLNGIKIIGSIVGTRKDLQEALQFAAEGKVKTIIEVQPLEKINEVFDRMLKGQINGRVVLTLEDK

SEQ ID NO: 696 - protein, 336 aa, Staphylococcus aureus
MRAAVVTKDHKVSIEDKKLRALKPGEALVQTEYCGVCHTDLHVKNADFGDVTGVTLGHEGIGKVIEVAEDVESLKIGDRVSIAWMFESCGRCEYCTTGRETLCRSVKNAGYTVDGAMAEQVIVTADYAVKVPEKLDPAAASSITCAGVTTYKAVKVSNVKPGQWLGVFGIGGLGNLALQYAKNVMGAKIVAFDINDDKLAFAKELGADAIINSKDVDPVAEVMKLTDNKGLDATVVTSVAKTPFNQAVDVVKAGARVVAVGLPVDKMNLDIPRLVLDGIEVVGSLVGTRQDLREAFEFAAENKVTPKVQLRKLEEINDIFEEMENGTITGRMVIKF

SEQ ID NO: 697 - protein, 365 aa, Apium graveolens
MAKSSEIEHPVKAFGWAARDTTGLLSPFKFSRRATGEKDVRLKVLFCGVCHSDHHMIHNNWGFTTYPIVPGHEIVGVVTEVGSKVEKVKVGDNVGIGCLVGSCRSCESCCDNRESHCENTIDTYGSIYFDGTMTHGGYSDTMVADEHFILRWPKNLPLDSGAPLLCAGITTYSPLKYYGLDKPGTKIGVVGLGGLGHVAVKMAKAFGAQVTVIDISESKRKEALEKLGADSFLLNSDQEQMKGARSSLDGIIDTVPVNHPLAPLFDLLKPNGKLVMVGAPEKPFELPVFSLLKGRKLLGGTINGGIKETQEMLDFAAKHNITADVEVIPMDYVNTAMERLVKSDVRYRFVIDIANTMRTEESLGA

SEQ ID NO: 698 - protein, 336 aa, Staphylococcus aureus
MRAAVVTKDHKVSIEDKKLRALKPGEALVQTEYCGVCHTDLHVKNADFGDVTGVTLGHEGIGKVIEVAEDVESLKIGDRVSIAWMFESCGRCEYCTTGRETLCRSVKNAGYTVDGAMAEQVIVTADYAVKVPEKLDPAAASSITCAGVTTYKAVKVSNVKPGQWLGVFGIGGLGNLALQYAKNVMGAKIVAFDINDDKLAFAKELGADAIINSKDVDPVAEVMKLTDNKGLDATVVTSVAKTPFNQAVDVVKAGARVVAVGLPVDKMNLDIPRLVLDGIEVVGSLVGTRQDLREAFEFAAENKVTPKVQLRKLEEINDIFEEMEKGTITGRMVIKF

SEQ ID NO: 699 - protein, 346 aa, Gibberella fujikuroi
MQALVGAETGGYRLADNVEKPVLQPGSILCHVKAVALNPHDAKIVDYSNVPGALGGCDFAGVVVEIGNGVKRFKEGDRVFAVTFGMNASDKTAGAFTQYAVATEDLSCLIPEAMSFTEACSMGLAIATAGLALFQTPGLQLSMQGGNGEAVLVSGGATATGTMAIQFLRIAGYTPVVTCSPSNNALCESFGAEICFDYHSPTCGADIRVQTGNKLRHVLDCVVDISTMKMSYDAIGSSGGAYVALEAIPTNIKYTRRDICANWLMAPSILGTPVNKKGAYGRPSMPEHRQFGTYLFALAEKWLQDGSIKHHPIEIREGGLRSIREGIDDLRRGNVHAKKLVYPLSA

SEQ ID NO: 700 - protein, 351 aa, Marinobacter similis
MTATKAYAAQSSTSGMAPHDIDRRSLRNDDIAIEIDYCGVCHTDIHFAQNDWGVTQYPVVPGHEIVGRVTAVGPGVKAYQEGDVVGVGCMVDSCRTCSACEAGLEQYCSEGMTGTYNGEDRQDHSITFGGYSERIVVSERFVVRIPDKLDITKAAPLLCAGITTYSPLRHYGVKPGHKVGVIGMGGLGHMGVKFAKALGAEVTIFTRSESKVGEAKKQGADYVVVSTDEDQMAAAAETFDFMLDTVPVQHDINPYLNCLSYDGTHIMVGLLEPLEPALQTGALVFKRRVLAGSLIGGMPETQEVLDFCAEHDISCDVEMLDIHNINDAYERMKKGDVKYRFVIDMATLKDS

What is claimed is:

1. A host cell that comprises a heterologous polynucleotide encoding a leucine dehydrogenase (LeuDH) enzyme, wherein the LeuDH enzyme comprises an amino acid sequence that is at least 90% identical to a sequence selected from SEQ ID NOs: 2, 4, 6, 8, 10, and 12.

2. The host cell of claim 1, wherein the LeuDH enzyme comprises an amino acid sequence that is at least 90% identical to SEQ ID NO: 2.

3. The host cell of claim 2, wherein the LeuDH enzyme comprises SEQ ID NO: 2.

4. The host cell of claim 1 or 2, wherein the LeuDH enzyme comprises:
a) V at a residue corresponding to residue 13 in SEQ ID NO: 27;
b) W at a residue corresponding to residue 16 in SEQ ID NO: 27;
c) Q at a residue corresponding to residue 42 in SEQ ID NO: 27;
d) T, Y, F, E, or W at a residue corresponding to residue 43 in SEQ ID NO: 27;
e) I, H, K, or Y at a residue corresponding to residue 44 in SEQ ID NO: 27;
f) T, E, A, S, or K at a residue corresponding to residue 67 in SEQ ID NO: 27;
g) K at a residue corresponding to residue 71 in SEQ ID NO: 27;
h) S at a residue corresponding to residue 73 in SEQ ID NO: 27;
i) R, H, Y, S, K, or W at a residue corresponding to residue 76 in SEQ ID NO: 27;
j) Y at a residue corresponding to residue 92 in SEQ ID NO: 27;
k) H at a residue corresponding to residue 93 in SEQ ID NO: 27;
l) G at a residue corresponding to residue 95 in SEQ ID NO: 27;
m) G at a residue corresponding to residue 100 in SEQ ID NO: 27;
n) C at a residue corresponding to residue 105 in SEQ ID NO: 27;
o) G at a residue corresponding to residue 111 in SEQ ID NO: 27;
p) M at a residue corresponding to residue 113 in SEQ ID NO: 27;
q) N or V at a residue corresponding to residue 115 in SEQ ID NO: 27;
r) R, N, or W at a residue corresponding to residue 116 in SEQ ID NO: 27;
s) A at a residue corresponding to residue 120 in SEQ ID NO: 27;
t) D at a residue corresponding to residue 122 in SEQ ID NO: 27;
u) E at a residue corresponding to residue 136 in SEQ ID NO: 27;
v) D at a residue corresponding to residue 140 in SEQ ID NO: 27;
w) M at a residue corresponding to residue 141 in SEQ ID NO: 27;
x) S at a residue corresponding to residue 160 in SEQ ID NO: 27;
y) F at a residue corresponding to residue 185 in SEQ ID NO: 27;
z) N at a residue corresponding to residue 196 in SEQ ID NO: 27;
aa) Y at a residue corresponding to residue 228 in SEQ ID NO: 27;
bb) M at a residue corresponding to residue 248 in SEQ ID NO: 27;
cc) C at a residue corresponding to residue 256 in SEQ ID NO: 27;
dd) Q or C at a residue corresponding to residue 293 in SEQ ID NO: 27;
ee) K or N at a residue corresponding to residue 296 in SEQ ID NO: 27;
ff) R, Q, or K at a residue corresponding to residue 297 in SEQ ID NO: 27;
gg) C or D at a residue corresponding to residue 300 in SEQ ID NO: 27;
hh) T or S at a residue corresponding to residue 302 in SEQ ID NO: 27;
ii) C at a residue corresponding to residue 305 in SEQ ID NO: 27;
jj) F at a residue corresponding to residue 319 in SEQ ID NO: 27; and/or
kk) M at a residue corresponding to residue 330 in SEQ ID NO: 27.

5. The host cell of claim 4, wherein the LeuDH enzyme comprises all of (a)-(kk).

6. A host cell that comprises a heterologous polynucleotide encoding a leucine dehydrogenase (LeuDH) enzyme, wherein relative to SEQ ID NO: 27, the LeuDH enzyme comprises an amino acid substitution at amino acid residue: 42, 43, 44, 67, 71, 76, 78, 113, 115, 116, 136, 293, 296, 297 and/or 300.

7. The host cell of claim 6, wherein the LeuDH enzyme comprises:
a) A, Q, or T at residue 42;
b) E, F, T, W, or Y at residue 43;
c) H, I, K, or Y at residue 44;
d) A, E, K, Q, S, or T at residue 67;
e) C, D, H, K, M, or Tat residue 71;
f) E, F, H, I, K, M, R, S, T, W, or Y at residue 76;
g) C, F, H, K, Q, V, or Y at residue 78;
h) F, M, Q, V, W, or Y at residue 113;
i) N, Q, S, T, or V at residue 115;
j) A, L, M, N, R, S, V, or W at residue 116;
k) E, F, L, R, S, or Y at residue 136;
l) A, C, Q, S, or T at residue 293;
m) A, C, E, I, K, L, N, S, or T at residue 296;
n) C, D, E, F, H, K, L, M, N, Q, R, T, W, or Y at residue 297; and/or
o) A, C, D, F, H, K, M, N, Q, R, S, T, W, or Y at residue 300.

8. A non-naturally occurring LeuDH enzyme, wherein relative to SEQ ID NO: 27, the LeuDH enzyme comprises an amino acid substitution at amino acid residue:
42, 43, 44, 67, 71, 76, 78, 113, 115, 116, 136, 293, 296, 297 and/or 300.

9. The non-naturally occurring LeuDH enzyme of claim 8, wherein the LeuDH enzyme comprises:
a) A, Q, or T at residue 42;
b) E, F, T, W, or Y at residue 43;
c) H, I, K, or Y at residue 44;
d) A, E, K, Q, S, or T at residue 67;
e) C, D, H, K, M, or Tat residue 71;
f) E, F, H, I, K, M, R, S, T, W, or Y at residue 76;
g) C, F, H, K, Q, V, or Y at residue 78;
h) F, M, Q, V, W, or Y at residue 113;
i) N, Q, S, T, or V at residue 115;
j) A, L, M, N, R, S, V, or W at residue 116;
k) E, F, L, R, S, or Y at residue 136;
l) A, C, Q, S, or T at residue 293;
m) A, C, E, I, K, L, N, S, or T at residue 296;
n) C, D, E, F, H, K, L, M, N, Q, R, T, W, or Y at residue 297; and/or
o) A, C, D, F, H, K, M, N, Q, R, S, T, W, or Y at residue 300.

10. A host cell that comprises a heterologous polynucleotide encoding a branched chain α-ketoacid decarboxylase (KivD) enzyme, wherein the KivD enzyme comprises an amino acid sequence that is at least 90% identical to a sequence selected from SEQ ID NOs: 14, 16, and 18.

11. The host cell of claim 10, wherein the KivD enzyme comprises an amino acid sequence that is at least 90% identical to SEQ ID NO: 18.

12. The host cell of claim 11, wherein the KivD enzyme comprises SEQ ID NO: 18.

13. The host cell of claim 10 or 11, wherein the KivD enzyme comprises:
a) Y at a residue corresponding to residue 33 in SEQ ID NO: 29;
b) Q at a residue corresponding to residue 44 in SEQ ID NO: 29;
c) M at a residue corresponding to residue 117 in SEQ ID NO: 29;
d) I at a residue corresponding to residue 129 in SEQ ID NO: 29;
e) W at a residue corresponding to residue 185 in SEQ ID NO: 29;
f) I at a residue corresponding to residue 190 in SEQ ID NO: 29;
g) I at a residue corresponding to residue 225 in SEQ ID NO: 29;
h) Y at a residue corresponding to residue 227 in SEQ ID NO: 29;
i) L at a residue corresponding to residue 311 in SEQ ID NO: 29;
j) G at a residue corresponding to residue 312 in SEQ ID NO: 29;
k) T at a residue corresponding to residue 313 in SEQ ID NO: 29;
l) P at a residue corresponding to residue 328 in SEQ ID NO: 29;
m) W at a residue corresponding to residue 341 in SEQ ID NO: 29;
n) H at a residue corresponding to residue 345 in SEQ ID NO: 29;
o) C at a residue corresponding to residue 347 in SEQ ID NO: 29;
p) R at a residue corresponding to residue 420 in SEQ ID NO: 29;
q) D at a residue corresponding to residue 494 in SEQ ID NO: 29;
r) C at a residue corresponding to residue 508 in SEQ ID NO: 29; and/or
s) F at a residue corresponding to residue 550 in SEQ ID NO: 29.

14. The host cell of claim 13, wherein the KivD enzyme comprises all of (a)-(s).

15. A host cell that comprises a heterologous polynucleotide encoding a an alcohol dehydrogenase (Adh) enzyme wherein the Adh enzyme comprises an amino acid sequence that is at least 90% identical to a sequence selected from SEQ ID NOs: 20, 22, and 24.

16. The host cell of claim 15, wherein the Adh enzyme comprises an amino acid sequence that is at least 90% identical to SEQ ID NO: 24.

17. The host cell of claim 16, wherein the Adh enzyme comprises SEQ ID NO: 24.

18. The host cell of claim 15 or 16, wherein the Adh enzyme comprises:
a) P at a residue corresponding to residue 9 in SEQ ID NO: 31;
b) G at a residue corresponding to residue 16 in SEQ ID NO: 31;
c) Q at a residue corresponding to residue 23 in SEQ ID NO: 31;
d) R at a residue corresponding to residue 28 in SEQ ID NO: 31;
e) A at a residue corresponding to residue 30 in SEQ ID NO: 31;
f) K at a residue corresponding to residue 93 in SEQ ID NO: 31;
g) L at a residue corresponding to residue 98 in SEQ ID NO: 31;
h) R at a residue corresponding to residue 99 in SEQ ID NO: 31;
i) P at a residue corresponding to residue 114 in SEQ ID NO: 31;
j) K at a residue corresponding to residue 115 in SEQ ID NO: 31;
k) Y at a residue corresponding to residue 119 in SEQ ID NO: 31;
l) Y at a residue corresponding to residue 194 in SEQ ID NO: 31;
m) P at a residue corresponding to residue 242 in SEQ ID NO: 31;
n) K at a residue corresponding to residue 249 in SEQ ID NO: 31;
o) E at a residue corresponding to residue 255 in SEQ ID NO: 31;
p) D at a residue corresponding to residue 260 in SEQ ID NO: 31;
q) H at a residue corresponding to residue 269 in SEQ ID NO: 31;
r) Q at a residue corresponding to residue 281 in SEQ ID NO: 31;
s) L at a residue corresponding to residue 325 in SEQ ID NO: 31;
t) M at a residue corresponding to residue 333 in SEQ ID NO: 31;
u) P at a residue corresponding to residue 334 in SEQ ID NO: 31; and/or
v) Q at a residue corresponding to residue 348 in SEQ ID NO: 31.

19. The host cell of claim 18, wherein the Adh enzyme comprises all of (a)-(v).

20. The host cell of any one of claims 1-7 and 10-19, wherein the host cell is a plant cell, an algal cell, a yeast cell, a bacterial cell, or an animal cell.

21. The host cell of claim 20, wherein the host cell is a yeast cell.

22. The host cell of claim 21, wherein the yeast cell is an Saccharomyces cell, a Yarrowia cell or a Pichia cell.

23. The host cell of claim 20, wherein the host cell is a bacterial cell.

24. The host cell of claim 23, wherein the bacterial cell is an E. coli cell or a Bacillus cell.

25. The host cell of any one of claims 1-7 and 10-24, wherein the host cell further comprises a heterologous polynucleotide encoding a Branched-chain amino acid transport system 2 carrier protein (BrnQ).

26. The host cell of claim 25, wherein the BrnQ protein is at least 90% identical to the amino acid sequence of SEQ ID NO: 35.

27. The host cell of any one of claims 1-7 and 10-26, wherein the heterologous polynucleotide is operably linked to an inducible promoter.

28. The host cell of any one of the claims 1-7 and 10-27, wherein the heterologous polynucleotide is expressed in an operon.

29. The host cell of claim 28, wherein the operon expresses more than one heterologous polynucleotide and wherein a ribosome binding site is present between each heterologous polynucleotide.

30. The host cell of any one of claims 1-7, wherein the host cell further comprises a heterologous polynucleotide encoding a KivD enzyme and/or a heterologous polynucleotide encoding an Adh enzyme.

31. The host cell of any one of claims 10-14, wherein the host cell further comprises a heterologous polynucleotide encoding a LeuDH enzyme and/or a heterologous polynucleotide encoding an Adh enzyme.

32. The host cell of any one of claims 15-19, wherein the host cell further comprises a heterologous polynucleotide encoding a LeuDH enzyme and/or a heterologous polynucleotide encoding a KivD enzyme.

33. The host cell of any one of claims 1-7 and 10-32, wherein the host cell is capable of producing isopentanol from leucine.

34. The host cell of claim 33, wherein the host cell consumes at least two-fold more leucine relative to a control host cell that comprises a heterologous polynucleotide encoding a control LeuDH enzyme comprising the sequence of SEQ ID NO: 27, a heterologous polynucleotide encoding a control KivD enzyme comprising the sequence of SEQ ID NO: 29, a heterologous polynucleotide encoding a control Adh enzyme comprising the sequence of SEQ ID NO: 31, and a heterologous polynucleotide encoding a control BrnQ protein comprising the sequence of SEQ ID NO: 35.

35. A method comprising culturing the host cell of any one of claims 1-7 and 10-34.

36. A method for producing isopentanol from leucine comprising culturing the host cell of any one of claims 1-7 and 10-34.

37. A non-naturally occurring nucleic acid comprising a sequence that is at least 90% identical to a nucleic acid sequence selected from SEQ ID NOs: 1, 3, 5, 7, 9, and 11.

38. A non-naturally occurring nucleic acid comprising a sequence that is at least 90% identical to a nucleic acid sequence selected from SEQ ID NOs: 13, 15, and 17.

39. A non-naturally occurring nucleic acid comprising a sequence that is at least 90% identical to a nucleic acid sequence selected from SEQ ID NOs: 19, 21, and 23.

40. A non-naturally occurring nucleic acid encoding a sequence that is at least 90% identical to a sequence selected from SEQ ID NOs: 2, 4, 6, 8, 10, and 12.

41. A non-naturally occurring nucleic acid encoding a sequence that is at least 90% identical to a sequence selected from SEQ ID NOs: 14, 16, and 18.

42. A non-naturally occurring nucleic acid encoding a sequence that is at least 90% identical to a sequence selected from SEQ ID NOs: 20, 22, and 24.

43. A vector comprising the non-naturally occurring nucleic acid of any one of claims 37-42.

44. An expression cassette comprising the non-naturally occurring nucleic acid of any one of claims 37-42.
